(19) United States
(12) Patent Application Publication
(10) Pub. No.: US 2023/0227508 A1
(43) Pub. Date: Jul. 20, 2023

(54) SPLIT INTEIN-BASED SELECTION FOR PEPTIDE BINDERS

(71) Applicant: Massachusetts Institute of Technology, Cambridge, MA (US)

(72) Inventors: Christopher A. Voigt, Belmont, MA (US); Andrew King, Cambridge, MA (US); Emerson Glassey, Malden, MA (US)

(73) Assignee: Massachusetts Institute of Technology, Cambridge, MA (US)

(21) Appl. No.: 18/009,357

(22) PCT Filed: Jun. 11, 2021
(86) PCT No.: PCT/US2021/037120

§ 371 Date: Dec. 9, 2022

Related U.S. Application Data
(60) Provisional application No. 63/038,394, filed on Jun. 12, 2020.

(51) Int. Cl. C07K 14/32; C12N 15/10

(52) U.S. Cl. CPC C07K 14/32; C12N 15/1086; C12N 15/1055; C07K 2319/92

(57) ABSTRACT

Disclosed herein, in some embodiments, non-naturally occurring proteins (e.g., non-naturally occurring modified proteins) that may be useful in the treatment of bacterial and viral infections, including SARS-CoV-2 infection, host cells comprising the same, and methods of treating bacterial and viral infections including SARS-CoV-2 infection. Also provided herein are host cells comprising fusion proteins for split intein-based selection of peptides that bind a target protein, methods of using the same, and methods of identifying peptides that bind a target protein.

### RELATED APPLICATION

[0001] This application claims the benefit under 35 U.S.C. § 119(e) of U.S. provisional application No. 63/038,394, filed Jun. 12, 2020, which is incorporated by reference herein in its entirety.

### FEDERALLY SPONSORED RESEARCH

[0002] This invention was made with Government support under Grant No. HR0011-15-C-0084 awarded by the Defense Advanced Research Projects Agency (DARPA). The Government has certain rights in this invention.

### BACKGROUND OF THE INVENTION

[0003] Protein-protein interactions play an important role in elucidating the mechanisms of biological systems and in numerous clinical applications. For example, during viral infection, viral surface proteins bind to host cell receptors to promote internalization of the viral genome. Inhibitors of the interaction between a viral surface protein and host cell receptors may be used to prevent viral infection or spread of such an infection to other host cells. Elucidation of protein-protein interactions have also led to development of immunotherapies and antibodies, which has been useful in the treatment of cancer. Accordingly, efficient methods of identifying peptide binders of target proteins are warranted.

### SUMMARY OF THE INVENTION

[0004] Aspects of the present disclosure relate to peptides binders of target proteins that may be useful in the treatment of disease and methods of identifying such peptides. Further aspects of the present disclosure provide non-naturally occurring peptides. In some embodiments, a non-naturally occurring peptide comprise:
[0005] (A) AACX₁X₂X₃X₄X₅X₆MPPX₇X₈X₉X₁₀X₁₁X₁₂C (SEQ ID NO: 1) (scaffold L1), wherein:
   [0006] (i) X₆ and X₇ are each the amino acid S or T;
   [0007] (ii) X₁-X₅ and X₈-X₁₂ are each any amino acid; and
   [0008] (iii) the peptide comprises a thioether bridge that links C at position 3 in to S or T at position 9 in SEQ ID NO: 1 and a thioether bridge that links S or T at position 13 to C at position 19 in SEQ ID NO: 1;
[0009] (B) X₁PX₂TTX₃X₄TX₅X₆X₇EX₈X₉DX₁₀DEX₁₁X₁₂X₁₃ (SEQ ID NO: 2) (scaffold L2), wherein:
   [0010] (i) X₂ is the amino acid H, Q, N, K, D, or E;
   [0011] (ii) X₆ is the amino acid F, L, S, I, M, T, V, or A;
   [0012] (iii) X₇ is the amino acid F, L, I, or V;
   [0013] (iv) X₁, X₃-X₅ and X₈-X₁₃ are each any amino acid; and
   [0014] (v) the peptide comprises an ester bridge that links T at position 5 of SEQ ID NO: 2 to D at position 15 of SEQ ID NO: 2 and an ester bridge that links T at position 8 of SEQ ID NO: 2 to E at position 12 of SEQ ID NO: 2;
[0015] (C) X₁CX₂X₃X₄X₅X₆CX₇X₈X₉X₁₀X₁₁ (SEQ ID NO: 3) (scaffold L3), wherein:
   [0016] (i) X₅ and X₁₀ are each the amino acid D or E;
   [0017] (ii) X₁-X₄, X₆-X₉, and X₁₁ are each any amino acid; and
   [0018] (iii) the peptide comprises a thioether bridge that links C at position 2 to D or E at position 6 of SEQ ID NO: 3 and a thioether bridge that links C at position 8 to D or E at position 12 of SEQ ID NO: 3;
[0019] (D) X₁CX₂X₃CX₄X₅X₆X₇X₈X₉ (SEQ ID NO: 4) (scaffold L4), wherein:
   [0020] (i) X₄ and X₇ are each the amino acid D or E;
   [0021] (ii) X₁-X₃, X₅-X₆, and X₈-X₉ are each any amino acid; and
   [0022] (iii) the peptide comprises a thioether bridge that links C at position 2 to D or E at position 6 of SEQ ID NO: 4 and a thioether bridge that links C at position 5 to D or E at position 9 of SEQ ID NO: 4; and/or
[0023] (E) X₁CX₂X₃X₄X₅X₆CX₇X₈CX₉X₁₀X₁₁X₁₂X₁₃ (SEQ ID NO: 5), wherein:
   [0024] (i) X₅, X₉, and X₁₂ are each the amino acid D or E;
   [0025] (ii) X₁-X₄, X₆-X₈, X₁₀-X₁₁, and X₁₃ are each any amino acid; and
   [0026] (iii) the peptide comprises a thioether bridge that links the C at position 2 to D or E at position 6 of SEQ ID NO: 5, a thioether bridge that links C at position 8 of SEQ ID NO: 5 with D or E at position 12 of SEQ ID NO: 5, and a thioether bridge that links C at position 11 with D or E at position 15 of SEQ ID NO: 5.

[0027] In some embodiments, the non-naturally occurring peptide comprises scaffold L5 and a sequence selected from SEQ ID NOS: 6-16; and/or scaffold L3 and a sequence selected from SEQ ID NOs: 17-25. In some embodiments, the non-naturally occurring peptide comprises scaffold L3 and SEQ ID NO: 24.

[0028] Further aspects of the present disclosure provide host cells comprising a heterologous nucleic acid encoding any of the non-naturally occurring peptides disclosed herein.

[0029] In some embodiments, the heterologous nucleic acid further encodes SEQ ID NO: 46.

[0030] In some embodiments, the heterologous nucleic acid comprises any one of SEQ ID NOs: 47-66.

[0031] Further aspects of the present disclosure provide:
[0032] (a) a first fusion protein comprising (i) a first fragment of a transcription factor, (ii) a first split intein, and (iii) a target protein;
[0033] (b) a second fusion protein comprising (i) a candidate peptide, (ii) a second split intein, and (iii) a second fragment of the transcription factor; wherein the first split intein and second split intein are complementary fragments; and
[0034] (c) an inducible promoter operably linked to at least one reporter gene, wherein the transcription factor induces transcription of the at least one reporter gene when the transcription factor is present as a full-length transcription factor.

[0035] In some embodiments,
[0036] (A) in (a), the first fusion protein comprises (i)-(iii) linked sequentially from the N-terminus to the C-terminus, the first fragment is a N-terminal fragment of the transcription factor and the first split intein is a N-terminal split intein; and
[0037] (B) in (b), (i)-(iii) are linked sequentially from the N-terminus to the C-terminus, wherein the second split intein is a C-terminal split intein, and the second fragment is a C-terminal fragment of the transcription factor; or
[0038] (C) in (a), from the N-terminus to the C-terminus, the first fusion protein comprises (iii) linked to (ii) linked to (i), wherein the first fragment is a C-terminal fragment of the transcription factor and the first split intein is a C-terminal split intein; and
[0039] (D) in (b), from the N-terminus to the C-terminus, the second fusion protein comprises (iii) linked to (ii) linked to (i), wherein the second split intein is a N-terminal split intein and the second fragment is a N-terminal fragment of the transcription factor.

[0040] In some embodiments, the cell is a eukaryotic or prokaryotic cell, optionally wherein the prokaryotic cell is a bacterial cell.

[0041] In some embodiments, the transcription factor is a sigma factor (a factor).

[0042] In some embodiments, the first fusion protein is encoded by a first heterologous nucleic acid and the second fusion is encoded by a second heterologous nucleic acid.

[0043] In some embodiments, the candidate peptide comprises a sequence selected from SEQ ID NOs: 6-25 or comprises the non-naturally occurring peptide of any one of claims 1 or 2, optionally wherein the candidate peptide further comprises SEQ ID NO: 46.

[0044] In some embodiments, the at least one reporter gene encodes a positive selection marker, a negative selection marker, and/or a fluorescent protein, optionally wherein the positive selection marker is an antibiotic resistance gene, optionally wherein the antibiotic resistance gene is chloramphenicol acetyltransferase (cat), optionally wherein the negative selection marker is the herpes simplex virus-thymidine kinase (hsvtk) gene.

[0045] In some embodiments, the inducible promoter is an ECF promoter.

[0046] In some embodiments, the target protein comprises viral receptor binding domain (RBD) of the SARS-CoV-2 spike protein.

[0047] In some embodiments, the RBD comprises SEQ ID NO: 71.

[0048] In some embodiments, the host cells further comprises one or more enzymes selected from ProcM, LynD, TgnB, or PapB, optionally wherein the host cell comprises a heterologous nucleic acid encoding the enzyme, optionally wherein the heterologous nucleic acid encoding the enzyme comprises an inducible promoter.

[0049] Further aspects of the disclosure provide methods of identifying a peptide that binds a target protein. In some embodiments, the methods comprise culturing any of the host cells disclosed herein and detecting transcription of the at least one reporter gene, thereby identifying the candidate peptide as being capable of binding to the target protein.

[0050] In some embodiments, the methods comprise incubating in a reaction vessel:
[0051] (a) a first fusion protein comprising (i) a first fragment of a transcription factor, (ii) a first split intein, and (iii) a target protein;
[0052] (b) a second fusion protein comprising (i) a candidate peptide, (ii) a second split intein, and (iii) a second fragment of the transcription factor; wherein the first and second split inteins belong to the same intein; and
[0053] (c) an inducible promoter operably linked to at least one reporter gene, wherein the transcription factor induces transcription of the at least one reporter gene when the transcription factor is present as a full-length transcription factor, and

[0054] detecting transcription of the reporter gene, thereby identifying the candidate peptide as being capable of binding to the target protein.

[0055] Further aspects of the present disclosure provide methods of treating a subject having or suspected of having a SARS-CoV-2 infection comprising administering an effective amount of any of the non-naturally occurring peptides disclosed herein.

[0056] In some embodiments, the method comprises repeating the method with a plurality of candidate peptides.

[0057] In some embodiments, culturing comprises positive and/or negative selection of the host cell.

[0058] In some embodiments, the method further comprises sequencing.

[0059] Further aspects of the disclosure provide libraries of peptides. In some embodiments, a library compress a plurality of peptides, wherein each peptide of the plurality of peptides has a length of n amino acids and has an amino acid sequence defined by a motif X₁X₂X₃X₄ . . . Xₙ, wherein n is 5-100, wherein each of X₁-Xₙ is independently selected from a group consisting of up to 20 amino acids and at least one of X₁-Xₙ within each peptide is an amino acid selected from a group consisting of 19 or fewer amino acids, and wherein the motif X₁X₂X₃X₄ . . . Xₙ is determined to be susceptible to post-translational modification by at least 2 distinct protein modification enzymes.

[0060] In some embodiments, less than 80% of the plurality of peptides are capable of being fully modified by the at least 2 distinct protein modification enzymes.

[0061] In some embodiments, at least one of X₁-Xₙ is defined to be a single amino acid.

[0062] According to some aspects of the disclosure, compositions comprising host cells are provided. In some embodiments, a composition comprises a plurality of host cells, each host cell of the plurality comprising a peptide of a library disclosed herein, wherein the peptide comprised by each host cell is independent of the peptide comprised by each other host cell. In some embodiments, the composition comprises each peptide of the plurality of peptides. In some embodiments, the host cells are bacterial cells. In some embodiments, the peptide is encoded by a first nucleic acid sequence in the host cell. In some embodiments, each host cell further comprises at least one protein modifying enzyme. In some embodiments, the at least one protein modifying enzyme is encoded by a second nucleic acid sequence in the host cell.

[0063] Further aspects of the disclosure provide methods of designing amino acid motifs. In some embodiments, a method of designing an amino acid motif comprises:

[0064] (i) selecting one or more protein modifying enzymes;

[0065] (ii) identifying a recognition site (RS) sequence for each of the one or more protein modifying enzymes;

[0066] (iii) constructing a plurality of nucleic acid molecules, each nucleic acid molecule encoding a leader amino acid sequence comprising the RS sequence for each of the one or more protein modifying enzymes;

[0067] (iv) assigning a score to each of the plurality of nucleic acid molecules; and

[0068] (v) selecting one of the plurality of nucleic acid molecules based on step (iv),

[0069] to design the amino acid motif, wherein each RS sequence facilitates interaction of the corresponding protein modifying enzyme to a peptide defined by the amino acid motif, and wherein the leader amino acid sequence encoded by the nucleic acid molecule selected in step (v) is comprised within each peptide defined by the amino acid motif.

[0070] In some embodiments, each peptide defined by the amino acid motif further comprises a core sequence.

[0071] In some embodiments, the core sequence comprises one or more amino acids susceptible to modification by the one or more protein modifying enzymes.

### BRIEF DESCRIPTION OF THE DRAWINGS

[0072] The following drawings form part of the present specification and are included to further demonstrate certain aspects of the present disclosure, which can be better understood by reference to one or more of these drawings in combination with the detailed description of specific embodiments presented herein. For purposes of clarity, not every component may be labeled in every drawing. It is to be understood that the data illustrated in the drawings in no way limit the scope of the disclosure. In the drawings:

[0073] FIG. 1 shows a schematic of the split intein-based selection. Positive selection is effected by the expression of a chloramphenicol acetyltransferase (cat); negative selection effected by expression of herpes simplex virus thymidine kinase (hsvtk). Both effectors are expressed as fluorescent fusion proteins to facilitate population analysis/sorting by cytometry/FACS.

[0074] FIGS. 2A-2G show positive and negative transcriptional selection systems. FIG. 2A shows a genetic representation of selection operon comprising two fused proteins: superfolder-GFP fused to chloramphenicol acetyl transferase (sfGFP-CAT) and Herpes Simplex Virus thymidine kinase fused to mScarlet-I (HSVtk-mScarlet-I). FIG. 2B shows a schematic representation of a positive selection conducted with chloramphenicol (Cm). Only cells that have expressed sfGFP-CAT will be able to grow in the presence of Cm. FIG. 2C shows a schematic representation of a negative selection conducted with the nucleoside analog dP. Cells that have expressed HSVtk-mScarlet-I will not survive in the presence of dP. FIG. 2D shows a demonstration of titratable positive selection growth rescue dependence on expression of sfGFP-CAT (quantified through GFP relative expression units (REUs)) and the applied concentrations of Cm. FIG. 2E shows a demonstration of titratable negative selection growth inhibition dependence on expression of HSVtk-mScarlet-I (quantified through RFP REUs) and the applied concentrations of dP. FIG. 2F shows a schematic representation of the relationship between GFP REUs and the expression of sfGFP-CAT. Since sfGFP is translationally-fused to CAT, expression of CAT can be directly monitored and quantified by observing cellular fluorescence in the green channel. FIG. 2G shows a schematic representation of the relationship between RFP REUs and the expression of HSVtk-mScarlet-I. Since mScarlet-I is translationally-fused to HSVtk, expression of HSVtk can be directly monitored and quantified by observing cellular fluorescence in the red channel.

[0075] FIG. 3 shows a design of RiPP libraries for selections. The structures on the right-hand side correspond to scaffolds L1-L5 (SEQ ID NOs: 1-5). Scaffold L1 is a non-limiting example of a lanthipeptide scaffold. Scaffold L2 is a non-limiting example of a microviridin scaffold. Scaffolds L3-L5 are non-limiting examples of a ranthipeptide scaffold.

[0076] FIG. 4 shows a schematic of selection methods for initial campaign.

[0077] FIGS. 5A-5C show selections profiling of PapB library 1 (L3). FIG. 5A shows ring topology and amino acid degeneracy of library. FIG. 5B shows iterative selection stringencies are assigned an “sl” (selection) designation. FIG. 5C shows cytometry profiling of populations post-selection (from left to right, after a first round, second round, and third round of selection, respectively). First round of selection lead to escape mutants as evidenced by high REU values without induction. Later rounds demonstrate ideal population distributions.

[0078] FIGS. 6A-6B include data showing PapB library 1 (L3) hits. FIG. 6A shows PapB library 1 (L3) hits comprising >1% of the final population that were sequentially enriched throughout rounds of selection. FIG. 6B shows amino acid sequences and predicted cyclization topologies.

[0079] FIGS. 7A-7C show selection profiling of PapB library 3 (L5). FIG. 7A shows ring topology and amino acid degeneracy of library. FIG. 7B shows iterative selection stringencies are assigned a “sl” (selection) designation. FIG. 7C shows cytometry profiling of populations post-selection (from left to right, after a first round, second round, and third round of selection, respectively). First round of selection lead to escape mutants as evidenced by high REU values without induction. Later rounds demonstrate ideal population distributions.

[0080] FIGS. 8A-8B include data showing PapB library 3 (L5) hits. FIG. 8A shows PapB library 3 (L5) hits comprising >1% of the final population that were sequentially enriched throughout rounds of selection. FIG. 8B shows amino acid sequences and predicted cyclization topologies.

[0081] FIGS. 9A-9C show individual confirmation assays of selection hits. FIG. 9A shows REU values of 20 hits against the RBD-intein. FIG. 9B shows fold specificity of hits against the RBD. Fold specificity is defined as (REU-RBD)/(REU-Mdm2) where REU-RBD is the REU value of peptide against RBD-intein as target and REU-Mdm2 is the REU value of peptide against Mdm2-intein as target. FIG. 9C shows amino acid sequence and predicted topology of primary hit from pilot selection.

[0082] FIGS. 10A-10D show leader-dependent enzyme design constraints. FIG. 10A illustrates design constraints for leader-dependent modifying enzymes. FIG. 10B shows a flowchart for data acquisition and analysis for determining recognition sites. FIG. 10C shows the alanine scan variants for determining important residues in the TgnA precursor peptide. Residues replaced with alanine are indicated by the thicker portions in the bottom left sequence schematics. ΔΔGᵢ for each position is shown above the wild-type sequence. FIG. 10D shows the recognition site constraints for each of the leader-dependent enzymes. Secondary structure is shown above each peptide sequence. The recognition site for each of the leader-dependent enzymes is outlined by a box. Residues that had high ΔΔGᵢ scores but were not included in the recognition sites are labeled with an asterisk in the PlpA2 schematic. Residues that were included in the recognition site to maintain secondary structure are labeled with a triangle in the TruE schematic. Scatter plots show spacing variants for each enzyme. The fit line is based on Equation 3 from Example 3 with fit parameters listed in Table 6. FIG. 10E shows insertion and spacing variants tested for TgnA. Deletions were at the site indicated by the notch in each variant schematic (of the top 10 shown), and insertions are indicated by the thicker portion on the rightmost end of the last three variants. Insertion/deletion size is listed for each variant, alongside fractional modification. The thicker portion at the lefthand side of each variant schematic represent the recognition site.

[0083] FIGS. 11A-11C show the core motifs required for enzyme modification. FIG. 11A shows single mutant variant data for TgnA variants. The wild-type sequence is listed at the top, and each row represents a different variant with only mutated residue shown. The dashed line separates poorly modified residues (<50% of wild-type) from well modified residues (>50% of wild-type). The sequences above the dashed line were used to build the motif. FIG. 11B shows leader-dependent enzyme motifs. FIG. 11C shows leader-independent enzyme motifs. In FIGS. 11B and 11C, for each motif, the enzyme name is in bold and shown above the peptide name. Amino acids shown below the boxed wild-type sequence were observed and well-modified. Amino acids shown above the boxed sequence were not tolerated. Unobserved amino acids are not shown, except for positions labeled with a star or dagger. The core position of the first motif residue is labeled above the position, with the +1 sites additionally annotated in PaaP and LynD. Chemical modifications are shown on the modified residue(s) which are bolded. Positions that are allowed to be any amino acid are noted with a star, and a dagger indicates that the position is allowed to be any residue except cysteine.

[0084] FIGS. 12A-12D show automated design of hybrid core motifs and multi-modification of core peptide. FIG. 12A illustrates a design algorithm that combines user input of desired modifications and their positions, with demonstrated design showing combination of PlpXY, LynD, and ThcoK constraints. FIG. 12B illustrates an expression construct, showing inducer control of precursor peptide and modifying enzymes, modification of the precursor peptide, and cleavage to generate the final molecule.

[0085] FIGS. 13A-13J illustrate the split intein system for in vivo detection of protein-protein interactions. FIG. 13A shows a schematic of the binding interaction between the SARS-CoV-2 spike protein and the human ACE2 receptor. The receptor binding domain (RBD) of Spike protein is darkened. FIG. 13B shows a structural representation of the spike-ACE2 interaction. Only the spike RBD and the two N-terminal helices of ACE2 are shown. PDB ID: 6M17 97. FIG. 13C shows a schematic for the detection of a binding event between a RiPP and target. FIG. 13D illustrates inducible interaction-mediated splicing. The median fluorescence is shown as a function of the expression of the two halves of the sensor proteins. The induction of PMI-and Mdm2-driven association (left) or split intein alone (right) are shown. FIG. 13E shows the specificity calculated using the data in FIG. 13D: (Mdm2*−PMI)/(no bait-no peptide). The white dot in the lower right quadrant marks the highest fold-change in expression. FIG. 13F shows the fluorescence measured from the circuit containing a binding pair (Mdm2:PMI) and non-binding pairs. The 3O6-AHL concentration for all inductions was 1 μM. Three replicates and the mean values are shown. FIG. 13G shows a schematic of the RiPP-containing half of the split intein system. The modified core residue positions are shaded, and the RS for the modifying enzyme is shown within the leader. FIG. 13H shows the structure of the wild-type PapA modified peptide with a dashed box around the region used to design the peptide library. FIG. 13I shows a library sequence weblogo for the 9 unmodified library variants observed. FIG. 13J shows a library sequence weblogo for the 5 modified library variants observed.

[0086] FIGS. 14A-14F show a selection system to identify RBD-binding RiPPs. FIG. 14A shows a genetic circuit diagram for the RBD-binding RiPP selection system that is distributed across three plasmids and two genomic regions. Three small molecules: 3OC6-AHL, aTc, and cumate control the expression of the RiPP peptide, modifying enzyme 1, and modifying enzyme 2 (if present), respectively. FIG. 14B shows a schematic of selection output under two conditions: with an RBD-binding RiPP (top) and without an RBD-binding RiPP (bottom). Binding is shown to result in the production of chloramphenicol acetyltransferase (CAT; squares), such that bacteria in which an RBD-binding RiPP is expressed are selected based on chloramphenicol (Cm) resistance. FIG. 14C shows an overview of the positive of selection applied. Selection rounds were conducted in the presence of RiPP peptide and modifying enzymes and used increasing Cm concentrations for increased stringency. FIG. 14D shows a core scaffold for the pap2c library (lbAMK-103). Predicted macrocyles are indicated by brackets above constrained residues and “X” residues correspond to NNK translated amino acids. FIG. 14E show cytometry distributions for positive selections on the pap2c library beginning with no selection, round 2, and round 3 of positive selections (0, 800, and 1200 μM Cm, respectively). Fluorescence of the sfGFP fused to CAT is reported. FIG. 14F shows the measured fluorescence induced by an RBD-specific hit isolated from genetic selection. The RBD-binding RiPP was used as peptide against the non-specific bait (Mdm2*) and specific bait (RBD). The means were calculated from median fluorescence intensity of three replicates.

[0087] FIGS. 15A-15F show characterization of AMK-1057, a cyclic peptide that binds human-derived Spike RBD in vitro. FIG. 15A show a schematic of the peptide expression, modification, cleavage and purification steps. TEV cleavage removes the SUMO tag and HPLC purification produces the final product. Following TEV cleavage, a single G from the leader is left at the N-terminus of the product peptide. FIG. 15B shows high-resolution MS of unmodified AMK-1057 (top trace) and singly modified AMK-1057 (bottom trace). FIG. 15C shows high-resolution MS/MS of modified AMK-1057 and fragment mapping to the amino acid sequence. Numbered peaks correspond to fragment ions observed and represented as lettered amino acids next to MS/MS spectrum. FIG. 15D shows structural annotation of AMK-1057. FIG. 15E shows binding of purified, modified AMK-1057 to Spike RBD296-531 derived from a human cell line. Vertical dotted line indicates the start of the dissociation phase of the measurements. FIG. 15F shows binding of purified, unmodified AMK-1057 to human-derived Spike RBD. Vertical dotted line indicates the start of the dissociation phase of the measurements.

[0088] FIGS. 16A-16B illustrates cell competition for ACE2 binding by AMK-1057:RBD complex. FIG. 16A shows a schematic of ACE2 receptor binding inhibition by binding of AMK-1057 to RBD. FIG. 16B shows cytometry distributions for positive control (top trace; cells incubated with RBD only), negative control (bottom trace; cells incubated with vehicle), and cells incubated with RBD pre-incubated with 5 μM or 50 μM AMK-1057. Fluorescence signal represents fluorescence from labeled RBD.

[0089] FIGS. 17A-17B show optimization of binding affinity by tuning peptide expression. FIG. 17A shows comparisons of measured peptide binding to an on-target bait or an off-target bait under conditions of low peptide expression. FIG. 17B shows comparisons of measured peptide binding to an on-target bait or an off-target bait under conditions of high peptide expression. The results demonstrate that tuning expression allows characterization of peptide binding.

[0090] FIGS. 18A-18B show directed evolution of AMK-1057. FIG. 18A shows variant enrichment for single amino acid substitutions. Heatmap shows variant enrichment relative to the parent peptide. Arrows indicate selected core positions with substitutions that yielded positive enrichment. FIG. 18B show cytometry data for consensus variants containing up to 3 amino acid substitutions per variant, at the three positions indicated by arrows in FIG. 18A. The labeled peptide name indicates the respective amino acids at each of the three selected positions (e.g., “IVE” indicates that the indicated core amino acids were IVE rather than AVE in the parent peptide).

[0091] FIGS. 19A-19C show competition of AMK-1057 binding to RBD, measured via bio-layer interferometry. FIG. 19A shows AMK-1057 interferometry results measured with RBD in the presence of B38 antibody that does not overlap with the RBD ACE2 binding site. FIG. 19B shows AMK-1057 interferometry results measured with RBD in the presence of CR3022 antibody which overlaps with the RBD ACE2 binding site. FIG. 19C shows AMK-1057 interferometry results measured with RBD and AMK-1057 alone.

[0092] FIG. 20 shows an outline of native RiPP biosynthesis and export.

[0093] FIG. 21 shows the data mining strategy used to identify candidate peptide clusters. HMP microbial genomes were scanned for RiPP BGCs using AntiSMASH 4.0, a sequence similarity network generated for BGCs using BiG-SCAPE, and visualized using Cytoscape.

[0094] FIG. 22 shows a sequence similarity network of human microbiome RiPP BGCs. antiSMASH 4.0 was used to identify BGCs from 2,229 HMP genome sequences. 2,233 RiPP BGCs were clustered using BiG-SCAPE and visualized with Cytoscape. Nodes represent individual clusters shaded according to biosynthetic class. BGC nodes with similar cluster architecture are attached by edges.

[0095] FIGS. 23A-23E show a platform for large-scale RiPP BGC mining from sequence data. FIG. 23A shows the typical organization and native processing of a lanthipeptide BGC (the BGC and cartoon structure of nisin is shown). A ribosomally produced precursor peptide (RiPP) is dehydrated, cyclized, and cleaved to produce a mature antimicrobial cyclic peptide, nisin. lanA, precursor peptide; lanBC, lanthionine synthetase; lanT, transport; lanIFEG, immunity; lanP, leader peptide cleavage; lanRK, transcriptional regulation. FIG. 23B shows the typical organization and native processing of a lasso peptide BGC (the BGC and cartoon structure of microcin J25 is shown). A RiPP is cleaved and cyclized to produce a mature antimicrobial cyclic peptide, microcin J25. lasA, precursor peptide; lasBC, lasso peptide synthetase; last, transporter. FIG. 23C shows an engineered peptide expression system for lanthipeptides. An N-terminal hexa-histidine-SUMO fusion tag (HS-tag) followed by a protease site and precursor peptide allows for stabilized expression of putative lanthipeptide peptide sequences. Expression with putative modifying enzymes followed by affinity purification and in vitro proteolysis yields mature, processed peptide for assaying biological activity. FIG. 23D shows an engineered peptide expression system for lasso peptides. A C-terminal HS-tag was used instead of N-terminal to allow for leader peptide cleavage as part of biosynthesis. FIG. 23E shows a schematic for screening of engineered peptides. In the screening method, DNA sequences for putative precursor peptides and core biosynthetic enzymes are synthesized on medium copy plasmid backbones and transformed into an expression strain of E. coli in 96-well density. Expression, purification, processing, LC-MS analysis, and biological activity testing can all be done in 96-well plates.

[0096] FIG. 24 shows a taxonomic tree of lanthipeptide and lasso peptide producing organisms selected for heterologous expression.

[0097] FIG. 25 shows an example RiPP BGC and basic two-plasmid expression system for heterologous expression. HS, hexa-histidine-SUMO fusion tag.

[0098] FIG. 26 shows LC-MS traces corresponding to the BGC cluster shown in FIG. 25. The larger trace shows total ion chromatogram (TIC) for the peptide expressed alone or with modifying enzyme. The inset trace shows mass shifts from mass spectra taken from TIC peaks. Mass loss corresponds to multiple dehydrations indicating enzymatic modification.

[0099] FIG. 27 shows the results of tandem MS and HSEE analysis to annotate peptide structure. Single letters correspond to amino acids; lowercase b indicates dehydrobutyrine.

[0100] FIGS. 28A-28E show results of analysis of data mined for putative tailoring enzymes using the Marionette expression system, which enables high-throughput assaying of such enzymes. FIG. 28A shows the relative abundance of pfam domain occurrence in genetic proximity to lanBC modifying enzymes involved in type I lanthipeptide biosynthesis. FIG. 28B shows the relative abundance of pfam domain occurrence in genetic proximity to lanM modifying enzymes involved in type II lanthipeptide biosynthesis. FIG. 28C shows the relative abundance of pfam domain occurrence in genetic proximity to lanM modifying enzymes involved in type III lanthipeptide biosynthesis. FIG. 28D shows the relative abundance of pfam domain occurrence in genetic proximity to lasBC modifying enzymes involved in lasso peptide biosynthesis. FIG. 28E shows a schematic of the strategy for mining tailoring enzymes using the Marionette collection of orthogonal inducible promoters. In the screening strategy, putative precursor peptides (lanA), core modifying enzymes (lanBC), and putative tailoring enzymes (lanH1-3) are synthesized on individual plasmids and a one-pot type IIs assembly reaction generates a single modifying enzyme plasmid for use in co-expression platform. Each putative enzyme is under control of a separate inducer, allowing for systematic interrogation of function.

[0101] FIG. 29 shows RiPPs mined from diverse strains of the human microbiome. Peptides are organized by producing organism niche. Gene clusters are highlighted for open reading frames that were synthesized and heterologously expressed. Arrows show putative peptides, putative lanthionine synthetases, and putative tailoring enzymes. TIC traces are shown to the right of clusters with shading indicating eluted peptides. The peptide structures shown are annotated through tandem MS and HSEE.

[0102] FIG. 30 shows lasso peptides identified by mining the human microbiome.

[0103] FIGS. 31A-31D show identified candidate lanthipeptide tailoring enzymes. FIGS. 31A, 31B, and 31C show source BGCs and producing organisms followed by TIC traces+/−expression of tailoring enzymes and MS of largest peak. Precursor peptides (lanA, lanA1, lanA2) and modifying enzymes (lanM, lanB, lanC) are displayed, as are putative tailoring enzymes (lanH1, lanH2, and lanH3). BLAST was used to assign hypothetical tailoring enzyme annotations. In FIG. 31A, a flavodoxin-containing protein causes the production of a peak difficult to resolve via MS. In FIG. 31B, combined expression of OsmC family peroxiredoxin and truncated N-terminus of a lanM results in generation of a peak with a mass shift of +535.4 Da. In FIG. 31C, combined expression of a hut-D-like cupin, SM1 toxin immunity, and KptA-like protein resulted in generation of a peak with a mass shift of −533.2 Da. FIG. 31D shows TIC traces for expression of peptide and different tailoring enzymes from the M. odoratimimus BGC shown in FIG. 31C. These results demonstrate that KptA-like protein is required for modification of the peptide. The modified peptide corresponds to mass observed in FIG. 31C.

[0104] FIGS. 32A-32D show phylogenetic analysis of lanthipeptide producers. FIG. 32A shows a phylogenetic tree of all lanthipeptide producers. Organisms with BGCs that were successfully expressed in E. coli and detected are shaded. The tree was generated using NCBI taxonomic identifiers. FIG. 32B shows type I lanthipeptide synthetase (LanBC) modifications, which use glutamyl-tRNA (tRNA^{Glu}) to glutamylate Serine/Threonine residues for dehydration and subsequent cyclization. FIG. 32C shows type II/III lanthipeptide synthetase (LanM/K) modifications, which use ATP to phosphorylate Serine/Threonine residues for dehydration and subsequent cyclization. FIG. 32D shows a phylogenetic tree generated using tRNA^{Glu} sequences from type I lanthipeptide producers investigated herein. Organisms with BGCs that were successfully expressed in E. coli and detected are shaded.

[0105] FIGS. 33A-33B show results of screens for RiPP antimicrobial activity. FIG. 33A shows select images of zones of inhibition from disc-diffusion assays of purified lanthipeptides. For each row of images, the compound ID, microbiome niche, and producing organism are listed. Indicator organisms used are organized in columns. Circles in each image highlight zones of inhibition observed. FIG. 33B shows a heat map displaying residual growth in the presence of a set amount of SPE-purified RiPP. Residual growth was calculated for all indicator organisms as a ratio of OD600 measured in comparison to growth and sterility controls. These data demonstrate that lanthipeptides mined from the human microbiome have unique antimicrobial fingerprints.

[0106] FIG. 34 shows heat maps displaying residual growth in the presence of serial dilutions of antimicrobial lanthipeptides. Compound ID, microbiome niche, and producing organisms are displayed above each antimicrobial profile. Each row corresponds to the indicator organism grown in the presence of a 2-fold serial dilution of SPE-purified peptide. These results demonstrate that lanthipeptides mined from the human microbiome are active against MDR pathogens.

[0107] FIGS. 35A-35F show sequence-activity relationships of selected peptides. FIG. 35A shows cluster-associated Streptococcus-derived lanthipeptide core sequences. Amino acid similarity is annotated by extent of blue shading and consensus identity displayed above core sequences. Alignment was generated using the Geneious global alignment tool with free end gaps and a Blosum62 cost matrix. FIG. 35B shows the antimicrobial profiles of selected lanthipeptides against human microbiome bacterial strains. FIG. 35C shows the predicted structure of the related lanthipeptides from hypothetical structural annotation. Modified amino acids are shown with thick outlines. ‘b’ indicates dehydrobutyrine and ‘a’ indicates dehydroalanine. FIG. 35D shows amino acid sequence alignment of Rothia-derived cluster-associated lasso peptide core sequences. Amino acid similarity is annotated by darkness of shading, and the consensus identity sequence is displayed above the cored sequences. Alignment was generated using the Geneious global alignment tool with free end gaps and a Blosum62 cost matrix. FIG. 35E shows the antimicrobial profiles of selected lasso peptides against human microbiome bacterial strains. FIG. 35F shows the predicted structure of the related lasso peptides from hypothetical structural annotation. Modified amino acids are shown with thick outlines.

[0108] FIG. 36 shows peptide motifs for modification by LynD, PlpXY, PalS, PadeK, PaaA, ThcoK, TgnB, LasF, and EpiD enzymes. In each motif, the amino acid(s) modified by each respective enzyme are bolded. The boxed core peptide sequence shows the parental sequence, and the amino acids annotated below each position show the options that are allowable for each modification enzyme. The left-most boxed amino acids in the LynD (LAELSEEAL (SEQ ID NO: 84)), PlpXY (LNEEELEAIAG (SEQ ID NO: 85)), PaaA (SQRISAIT (SEQ ID NO: 86)), and TgnB (PYIAKYV (SEQ ID NO: 87)) motifs show the leader recognition site (RS) sequences, and the distance ranges annotated above the LynD, PlpXY, and TgnB motifs indicate the limitation on available distances between the RS and the amino acid to be modified.

[0109] FIGS. 37A-37F show identification of a peptide motif to be modified by three distinct enzymes (two leader-dependent enzymes and one tailoring enzyme). FIG. 37A shows an example schematic of a peptide motif (leader+core) with three modifying enzymes. FIG. 37B shows an example motif with three particular modifications incorporated by three distinct enzymes (top) and the chemical structure of an example peptide with those modifications. FIG. 37C shows the peptide motif generated by combining the distinct motif restrictions for LynD, PlpXY, and ThcoK. In the right motif, the amino acids shown below each position in the peptide schematic indicate the allowable amino acids at each given position based on the combination of three enzyme restrictions. FIG. 37D shows a schematic of the screening method for identifying the leader sequence incorporating the LynD and PlpXY recognition sites (RSs) and the score calculated for each possible leader. FIG. 37E shows the identified peptide motif (leader+core) based on the combination of LynD, PlpXY, and ThcoK sequence restrictions. FIG. 37F shows 11 peptides isolated from screening the degenerate library built based on the motif shown in FIG. 37E. Amino acids that did not fall within the motif are shaded.

[0110] FIG. 38 shows peptide motifs built for modification by various combinations of distinct modifying enzymes, labeled to the left of each amino acid sequence. The modifications introduced by the specific combination of enzymes are shown on each amino acid sequence.

[0111] FIG. 39 shows a schematic of the Small Ubiquitin-like Modifier (SUMO) protein tag (top) used in an approach to stabilize ribosomally synthesized and post-translationally modified peptides (RiPPs), allowing modification of the core peptide sequence by modification enzymes, purification, and isolation of the modified peptide. The RiPP stabilization tag comprises an affinity-tag, a solubilization-tag, and a TEV or thrombin cleavage site, with flexible linkers separating elements. It stabilizes precursor peptides when attached to the N- or C-terminus, and is compatible with many diverse protein-modifying enzymes. Example peptide modifications facilitated thereby are also shown (bottom).

[0112] FIGS. 40A-40C show an overview of an expression system for producing modified peptides. FIG. 40A shows a schematic of N-terminal and C-terminal RiPP stabilization tags (RSTs). FIG. 40B shows a two-plasmid system used for expression of the RST-tagged precursor peptide (top) and modifying enzyme (bottom). The peptide-expressing plasmid is IPTG-inducible, and the modifying enzyme is cumate-inducible. FIG. 40C shows a schematic of the subsequent analysis steps following peptide synthesis. Peptides extracted from their host cells are analyzed by LCMS for mass shifts associated with modification. The low molecular weight of the RST allows for easier high confidence analysis of the modification.

[0113] FIG. 41 shows stabilization of unmodified peptides from diverse RiPP classes using the SUMO tag. SUMO protein successfully stabilized expression of seven precursor peptides with varying lengths and amino acid compositions, each from a different RiPP family, with two additional peptides stabilized after cleavage (presumably by endogenous E. coli proteases). In comparison, HIS6 tag only successfully showed four minor peptide peaks. Boxes in the microviridin, bottromycin, streptide, pyrroloquinoline quinone, lanthipeptide, thiopeptide, and pheganomycin traces indicate that the given peak was present in sample, absent in the negative control, and had the expected mass; boxes in the sactipeptide and trifolitoxin traces indicate that the given peak was present in sample, absent in the negative control, but did not have the expected mass.

[0114] FIGS. 42A-42E show characterization of RST-tagged haloduracin A1 (HalA1) and A2 (HalA2) peptides, demonstrating that RST-tagged peptides can be modified, cleaved, and purified as bioactive molecules. FIG. 42A shows schematics of both RST-tagged HalA1 and HalA2 peptides, which were engineered to have TEV cleavage sites in between the leader and core peptides, with RST_{N} tags. FIG. 42B shows the post-cleavage structures of HalA1 and HalA2. After expression and modification of HalA1 and HalA2, the peptides were purified by LCMS (FIG. 42C) and the SUMO tag and leader peptide were cleaved from the core (FIG. 42D). FIGS. 42C and 42D show LCMS traces for HalA1 (left) and HalA2 (right) during purification and following cleavage, respectively. FIG. 42E shows LC-MS/MS fragmentation spectra of cleaved HalA1 and HalA2, which demonstrate masses that match fragments of the structures shown in FIG. 42B. FIG. 42F shows the results of treatment of B. subtilis reporter strain with HalA1 and HalA2. The results demonstrate that HalA1 and HalA2 individually had minimal antibacterial activity, but both haloduracins together successfully inhibited bacterial growth of B. subtilis reporter strain.

[0115] FIG. 43 shows a bar chart of successful peptide/modifying enzyme combinations. Peptide plasmid number and gene name, modifying enzyme plasmid number and gene name, and replicate extract numbers are listed alongside fraction modified in TB (dark grey) and LB (light grey) medias. Dashed line demarcates 50% modification (half of peptide modified).

[0116] FIGS. 44A-44D show maps of plasmids used in Example 3. FIG. 44A shows N-term SUMO Backbone 2. FIG. 44B shows N-term SUMO Backbone 3, which is the same as N-term SUMO Backbone 2 but with flanking Bsa1 restriction sites around the peptide operon. FIG. 44C shows Cumate Modifying Enzyme Backbone. FIG. 44D shows Multi-Enzyme Backbone.

[0117] FIGS. 45A-45C show a multiply modified peptide library. FIG. 45A shows a hybrid motif combining the PlpXY, LynD, and ThcoK motifs, with modified positions bolded and showing modification where possible. The bolded tyrosine is excised in the modification process, but still shown in this motif. FIG. 45B shows the peptide sequence that was built, with degenerate nucleotide sequences shown above the peptide structure for each amino acid position, and the resulting amino acids encoded. FIG. 45C shows a set of peptide sequences that were isolated from the library. Amino acid residues that do not match the hybrid motif (shown in FIG. 45A) are shown shaded. The non-matching residues were not observed in the original data set, but were not unallowed. The degenerate nucleotide sequences resulted in production of certain peptides having certain amino acids not included in the hybrid motif. The bolded sequence labels (2582, 2583, 2585, and 2587) indicate the peptides that were successfully triply-modified.

[0118] FIG. 46 shows baseline fractional modification for modifying enzymes. Leader, core, and follower sequences were used to establish baseline. A SUMO tag is represented by a square at the beginning of each sequence. The modified residues are underlined.

[0119] FIGS. 47A-47D show leader and core amino acid sequence screening for TgnB enzyme. FIG. 47A shows results of an alanine scan (top) and deletion/addition scan (bottom) of the leader sequence, with the fraction modified, ratio modified, ΔΔG for each variant peptide and for each position of the leader sequence. FIG. 47B shows results of a peptide variant scan of the core sequence. The top amino acid sequence in bold represents the wild-type core sequence, and subsequent rows show the substituted amino acid(s) in each variant, alongside the fraction modified for each variant. FIG. 47C shows a core sequence amino acid variant tolerance summary, in which the wild-type sequence is boxed, and amino acids below the wild-type sequence represent amino acids tested at each position that were found to be tolerated, and amino acids shown above represent those tested and found to be not tolerated. FIG. 47D shows sequence constraints for the core motif, the recognition sequence, and the distance between the recognition sequence and the amino acid to be modified.

[0120] FIGS. 48A-48D show leader and core amino acid sequence screening for PlpXy enzyme. FIG. 48A shows results of an alanine scan of the leader sequence, with the fraction modified, ratio modified, ΔΔG for each variant peptide and for each position of the leader sequence (top) and candidate deletion/addition peptides (bottom). FIG. 48B shows results of a peptide variant scan of the core sequence. The top amino acid sequence in bold represents the wild-type core sequence, and subsequent rows show the substituted amino acid(s) in each variant, alongside the fraction modified for each variant. FIG. 48C shows a core sequence amino acid variant tolerance summary, in which the wild-type sequence is boxed, and amino acids below the wild-type sequence represent amino acids tested at each position that were found to be tolerated, and amino acids shown above represent those tested and found to be not tolerated. FIG. 48D shows sequence constraints for the core motif, the recognition sequence, and the distance between the recognition sequence and the amino acid to be modified.

[0121] FIGS. 49A-47C show leader and core amino acid sequence screening for PaaA enzyme. FIG. 49A shows results of an alanine scan (top) and deletion/addition scan (middle and bottom) of the leader sequence, with the fraction modified, ratio modified, ΔΔG for each variant peptide and for each position of the leader sequence. FIG. 49B shows a core sequence amino acid variant tolerance summary, in which the wild-type sequence is boxed, and amino acids below the wild-type sequence represent amino acids tested at each position that were found to be tolerated, and amino acids shown above represent those tested and found to be not tolerated. FIG. 49C shows sequence constraints for the core motif, the recognition sequence, and the distance between the recognition sequence and the amino acid to be modified.

[0122] FIGS. 50A-50D show leader and core amino acid sequence screening for LynD enzyme. FIG. 50A shows results of an alanine scan (top) and deletion/addition scan (bottom) of the leader sequence, with the fraction modified, ratio modified, ΔΔG for each variant peptide and for each position of the leader sequence. FIG. 50B shows results of a peptide variant scan of the core sequence. The top amino acid sequence in bold represents the wild-type core sequence, and subsequent rows show the substituted amino acid(s) in each variant, alongside the fraction modified for each variant. FIG. 50C shows a core sequence amino acid variant tolerance summary, in which the wild-type sequence is boxed, and amino acids below the wild-type sequence represent amino acids tested at each position that were found to be tolerated. Positions with sufficient diversity such that they are allowed to be any amino acid are annotated with a star. Positions with sufficient diversity such that they are allowed to be any amino acid except for cysteine are annotated with a dagger. FIG. 50D shows sequence constraints for the core motif, the recognition sequence, and the distance between the recognition sequence and the amino acid to be modified.

[0123] FIGS. 51A-51C show core amino acid sequence screening for EpiD enzyme. FIG. 51A shows results of a peptide variant scan of the core sequence. The top amino acid sequence in bold represents the wild-type core sequence, and subsequent rows show the substituted amino acid(s) in each variant, alongside the fraction modified for each variant. FIG. 51B shows a core sequence amino acid variant tolerance summary, in which the wild-type sequence is boxed, and amino acids below the wild-type sequence represent amino acids tested at each position that were found to be tolerated, and amino acids shown above represent those tested and found to be not tolerated. Positions with sufficient diversity such that they are allowed to be any amino acid are annotated with a star. FIG. 51C shows sequence constraints for the core motif.

[0124] FIGS. 52A-52C show core amino acid sequence screening for PalS enzyme. FIG. 52A shows results of a peptide variant scan of the core sequence. The top amino acid sequence in bold represents the wild-type core sequence, and subsequent rows show the substituted amino acid(s) in each variant, alongside the fraction modified for each variant. FIG. 52B shows a core sequence amino acid variant tolerance summary, in which the wild-type sequence is boxed, and amino acids below the wild-type sequence represent amino acids tested at each position that were found to be tolerated, and amino acids shown above represent those tested and found to be not tolerated. Positions with sufficient diversity such that they are allowed to be any amino acid are annotated with a star. FIG. 52C shows sequence constraints for the core motif.

[0125] FIGS. 53A-53C show core amino acid sequence screening for LasF enzyme. FIG. 53A shows results of a peptide variant scan of the core sequence. The top amino acid sequence in bold represents the wild-type core sequence, and subsequent rows show the substituted amino acid(s) in each variant, alongside the fraction modified for each variant. FIG. 53B shows a core sequence amino acid variant tolerance summary, in which the wild-type sequence is boxed, and amino acids below the wild-type sequence represent amino acids tested at each position that were found to be tolerated, and amino acids shown above represent those tested and found to be not tolerated. FIG. 53C shows sequence constraints for the core motif.

[0126] FIGS. 54A-54C show core amino acid sequence screening for PadeK enzyme. FIG. 54A shows results of a peptide variant scan of the core sequence. The top amino acid sequence in bold represents the wild-type core sequence, and subsequent rows show the substituted amino acid(s) in each variant, alongside the fraction modified for each variant. FIG. 54B shows a core sequence amino acid variant tolerance summary, in which the wild-type sequence is boxed, and amino acids below the wild-type sequence represent amino acids tested at each position that were found to be tolerated, and amino acids shown above represent those tested and found to be not tolerated. Positions with sufficient diversity such that they are allowed to be any amino acid are annotated with a star. FIG. 54C shows sequence constraints for the core motif.

[0127] FIGS. 55A-55C show core amino acid sequence screening for ThcoK enzyme. FIG. 55A shows results of a peptide variant scan of the core sequence. The top amino acid sequence in bold represents the wild-type core sequence, and subsequent rows show the substituted amino acid(s) in each variant, alongside the fraction modified for each variant. FIG. 55B shows a core sequence amino acid variant tolerance summary, in which the wild-type sequence is boxed, and amino acids below the wild-type sequence represent amino acids tested at each position that were found to be tolerated, and amino acids shown above represent those tested and found to be not tolerated. Positions with sufficient diversity such that they are allowed to be any amino acid are annotated with a star. FIG. 55C shows sequence constraints for the core motif.

[0128] FIG. 56 shows weblogos for the leader peptides of leader-dependent enzymes. Blastp results for each of the leaders (plus core and follower for PaaP) were aligned using Cobalt and visualized using Weblogo. Each weblogo was then aligned to the leader sequence used in Example 3. The x-axis corresponds to the position within each leader sequence and the recognition sites are outlined in boxes.

[0129] FIG. 58 shows a phylogenetic tree of species from which enzymes were mined. The tree was generated from the organisms listed in Table 13. Species from which functional enzymes were sourced are shown with a star (*).

[0130] FIG. 59 shows a summary of select non-limiting RiPP chemical modifications. Each box shows an example structure with the modified residue(s). The amino acids involved in each chemical modification are shown in the lower left corner of each box, for instances in which amino acids are chemically restrictive.

### DETAILED DESCRIPTION OF THE INVENTION

[0131] Aspects of the present disclosure provide efficient methods of identifying peptide binders of target proteins using an intein-based system. As shown herein, the method is useful in identifying peptide binders of a target protein, including the viral receptor binding domain (RBD) of spike protein from SARS-CoV-2. In some embodiments, the methods disclosed herein have been used to identify modified peptide binders of RBD. Additional methods disclosed herein provide an efficient means of identifying peptides with particular properties and/or activity, such as biological activity. Libraries of peptides with useful characteristics are also provided, in addition to methods for their preparation and screening.

[0132] Without being bound by a particular theory, modified peptide binders have numerous advantages over traditional drug candidates including small molecule compounds and monoclonal antibodies (mABs). For example, small molecule compounds are often poor inhibitors of macromolecular interactions due to the physicochemical constraints of small molecule compounds; small molecule compounds are often not large enough to cover large binding interfaces. While mABs may be capable of occupying a larger binding surface area as compared to small molecule compounds, development of mABs is often slow, often taking about six months to identify a lead mAB against a target protein, have low stability, often require particular routes of administration (e.g., parenteral administration), and may have low cell penetrability. The methods and modified peptides described herein, in some embodiments, overcome many of these limitations. For example, in some embodiments, the peptide binders comprise modifications that increase stability, promote proteolytic resistance, and/or increase solubility.

[0133] Furthermore, conventional antibiotics used as drugs target diverse bacteria as part of their mode of action. This “broad-spectrum” activity has benefit in the treatment of life-threatening bacterial infections, as a single agent is able to address a large number of clinical indications. However, this broad-spectrum activity can also disrupt the subject's microbiome, leading to associated complications in health. The methods disclosed herein provide means for identifying peptides with antimicrobial activity, including narrow-spectrum activity. Narrow-spectrum antimicrobial agents are desirable to avoid microbiome disruptions and to mitigate selection pressure for widespread evolution of resistance to antibiotics. Narrow spectrum agents that can selectively remove specific bacteria are useful as both a subject-specific medicine, and as tool compounds to facilitate understanding of and manipulate the microbiome.

[0134] In early-stage drug discovery, candidate compounds are typically identified from two sources: natural products (e.g., isolated from natural sources such as plants or microbes) and combinatorial chemistry libraries of synthetic molecules. Inadequacies in ability to synthesize natural product-like molecules, as well as the prohibitive cost of identifying such molecules from nature, limit the ability to develop products (e.g., peptides) with desirable properties. In addition, molecules from combinatorial chemistry libraries lack the structural complexity necessary to identify ideal drug candidates. Engineered RiPPs provide the ability to biosynthesize structurally diverse small molecules (e.g., peptides) for screening and drug discovery.

[0135] In some embodiments, the methods disclosed herein allow for efficient methods of identifying candidate drugs against challenging therapeutic targets (e.g., targets that have been referred to as “undruggable”). Several cancer targets including KRAS, MYC, and transcription factors have been labeled as “undruggable targets” due to their large protein-protein interaction interfaces or due to the absence of protein pockets for binding. See, e.g., Whitfield et al., Front. Cell Dev. Biol. 5, 10 (2017) and McCormick et al., Clin. Cancer Res. 21, 1797-1801 (2015). In some embodiments, challenging therapeutic targets include particular microbes (e.g., drug-resistant bacteria, or bacteria of a class or species that is difficult to treat).

### Split Intein-Based Selection

[0136] Aspects of the present disclosure provide methods of identifying peptide binders of a target protein using split intein-based selection system. Additional aspects of the present disclosure provide methods of identifying peptides with particular desired properties, such as biological activity using a split intein-based selection system. FIG. 1 provides a non-limiting example of a split intein-based selection system.

[0137] An intein is an internal amino acid sequence that is post-translationally autoprocessed. During protein splicing, an intein self-excises from a precursor protein and ligates the flanking N- and C-terminal amino acid sequences (exteins or external protein sequences) via a new peptide bond. For example, a precursor protein may comprise the following configuration: N-extein-intein-C-extein. Following protein splicing, the following peptide is produced: N-extein-C-extein.

[0138] The intein, however, may be provided as two separate fragments (split inteins) rather than as contiguous sequence. During trans-splicing, the two fragments of the intein have to associate before protein splicing can occur. As used herein, an N-terminal intein (N-intein) comprises the N-terminal sequence of an intein, while the C-terminal intein (C-intein) comprises the C-terminal sequence of the same intein. When split inteins are used, the N-intein is linked to the C′ terminal end of the N-extein; the C-intein is located at the N′ end of the C-extein. The N-extein and the C-intein may belong to the same protein of interest. For example, the N-extein may comprise an N-terminal fragment of a protein of interest, while the C-intein comprises the C-terminal fragment of the same protein of interest, such that when the N-intein and C-intein associate, a full-length protein of interest is formed. See, e.g., Shah and Muir, Chem Sci. 2014; 5(1):446-461.

[0139] Any complementary split intein pair may be used including those known in the art. Non-limiting examples of complementary split inteins include the N-terminal intein NpuDNAE intein N (SEQ ID NO: 68) and the C-terminal intein NpuDNAE intein C (SEQ ID NO: 67). See also, e.g., US20200055900 and Stevens et al., J Am Chem Soc. 2016 Feb. 24; 138(7):2162-5.

[0140] In some embodiments, the methods described herein comprise using split inteins. In general, unless indicated otherwise, the split intein-based selection system described herein comprises two fusion proteins and an inducible promoter operably linked to a reporter gene. For example, the first fusion protein generally comprises (i) a first fragment of a transcription factor, (ii) a first split intein, and (iii) a target protein, and the second fusion protein may comprise (i) a candidate peptide, (ii) a second split intein, and (iii) a second fragment of the transcription factor. The first and second split inteins are complementary fragments, such that association of the first split intein with the second split intein promotes trans-splicing and formation of a full-length transcription factor to drive expression from the inducible promoter. As described below, it may also be possible to use the split intein-based system described herein without the need for a reporter gene operably linked to an inducible promoter (e.g., the fragments of the transcription factor may be replaced with fragments of a reporter protein).

[0141] In some embodiments, the first fusion protein comprises (i) a first fragment of a transcription factor, (ii) a first split intein, and (iii) a target protein linked sequentially from the N-terminus to the C-terminus, in which the first fragment is an N-terminal fragment of the transcription factor and the first split intein is an N-terminal split intein; and the second fusion comprises: (i) a candidate peptide, (ii) a second split intein, and (iii) a second fragment of the transcription factor linked sequentially from the N-terminus to the C-terminus, in which the second split intein is a C-terminal split intein, and the second fragment is a C-terminal fragment of the transcription factor.

[0142] In some embodiments, from the N-terminus to the C-terminus, the first fusion protein comprises a target protein linked to a first split intein linked to a first fragment of a transcription factor in which the first fragment is a C-terminal fragment of the transcription factor and the first split intein is a C-terminal split intein; and from the N-terminus to the C-terminus, the second fusion protein comprises a second fragment of the transcription factor linked to a second split intein linked to a candidate peptide, in which the second split intein is a N-terminal split intein and the second fragment is a N-terminal fragment of the transcription factor.

[0143] The first and second fusion proteins of the split intein-based selection system described herein may be used together with a nucleic acid comprising an inducible promoter operably linked to at least one reporter gene. Without being bound by a particular theory, binding of the (i) target protein in the first fusion protein with (ii) the candidate peptide in the second fusion protein brings the complementary split-intein in each fusion protein together to allow for protein splicing and release of a full-length transcription factor. The full-length transcription factor may then drive transcription from its cognate promoter. As used herein, a transcription factor is a protein that controls transcription (e.g., drives expression of a nucleic acid that is operably linked to a promoter). In some embodiments, a transcription factor binds to a promoter and drives transcription from the promoter. In some embodiments a transcription factor is an initiation factor. In some embodiments, a transcription factor is a sigma factor.

[0144] The promoter is operably linked to a reporter gene. A promoter is a control region of a nucleic acid sequence at which initiation and rate of transcription of the remainder of a nucleic acid sequence are controlled. A promoter may also contain sub-regions at which regulatory proteins and molecules may bind, such as RNA polymerase and other transcription factors. A promoter drives expression or drives transcription of the nucleic acid sequence that it regulates. A promoter is considered to be ‘operably linked’ to a nucleotide sequence when it is in a correct functional location and orientation in relation to the nucleotide sequence to control (‘drive’) transcriptional initiation and/or expression of that sequence. Promoters may be constitutive or inducible.

[0145] An inducible promoter is a promoter that is regulated (e.g., activated or inactivated) by the presence or absence of a particular factor. Inducible promoters for use in accordance with the present disclosure include any inducible promoter described herein or known to one of ordinary skill in the art. Examples of inducible promoters include, without limitation, chemically/biochemically-regulated and physically-regulated promoters such as alcohol-regulated promoters, tetracycline-regulated promoters (e.g., anhydrotetracycline (aTc)-responsive promoters and other tetracycline responsive promoter systems, which include a tetracycline repressor protein, steroid-regulated promoters (e.g., promoters based on the rat glucocorticoid receptor, human estrogen receptor, moth ecdysone receptors, and promoters from the steroid/retinoid/thyroid 25 receptor superfamily), metal-regulated promoters (e.g., promoters derived from metallothionein (proteins that bind and sequester metal ions) genes from yeast, mouse and human), pathogenesis-regulated promoters (e.g., induced by salicylic acid, ethylene or benzothiadiazole (BTH)), temperature/heat-inducible promoters (e.g., heat shock promoters), pH-regulated promoters, and light-regulated promoters. A non-limiting example of an inducible system that uses a light-regulated promoter is provided in Wang et al., Nat. Methods. 2012 Feb. 12; 9(3):266-9.

[0146] Non-limiting examples of inducible promoters include the inducible T5 lacO promoter, which may be induced by Isopropyl β-d-1-thiogalactopyranoside (IPTG), pCym promoter, which may be induced by cumate and a sigma-factor sensitive promoter, including an extra-cytoplasmic function (ECF) promoter.

[0147] In some embodiments, the promoter operably linked to a reporter gene is an extra-cytoplasmic function (ECF) promoter and the transcription factor is a sigma factor. In some embodiments, a Sigma factor comprises the N-terminal sequence ECF20_992 N (SEQ ID NO: 70) and the C-terminal sequence ECF20_992 C (SEQ ID NO: 69). Initiation of transcription in bacteria requires a sigma factor (a factor or specificity factor). Sigma factors bind to bacterial RNA polymerase to form a holoenzyme and initiate transcription. Non-limiting examples of sigma factors include extracytoplasmic function (ECF) a factors, a70 (RpoD), a19 (FecI), a24 (RpoE), a28 (RpoF/FliA), a32 (RpoH), a38 (RpoS), and 654 (RpoN). In some embodiments, a sigma factor is not a housekeeping sigma factor. In some embodiments, a sigma factor that is used is not native to a host cell and allows for orthogonal gene expression. As a non-limiting example, a sigma factor from B. subtilis that is not naturally expressed in E. coli may be used in E. coli for orthogonal gene expression. See also, e.g., Bervoets et al., Nucleic Acids Res. 2018 Feb. 28; 46(4): 2133-2144 and Pinto et al., Nucleic Acids Res. 2018 Aug. 21; 46(14):7450-7464. As would be appreciated by one of ordinary skill in the art, a particular sigma factor may require particular promoter elements to promote transcription and/or a particular environmental trigger including, e.g., heat. In some embodiments, additional activator proteins may be required for a sigma factor to function.

[0148] Non-limiting examples of reporter genes include genes that encode fluorescent proteins, enzymes, and antibiotic resistance genes. A reporter gene may allow for positive or negative selection.

[0149] In some embodiments, a reporter gene encodes a selection marker, such as an antibiotic resistance gene (e.g., bsd, neo, hygB, pac, ble, or Sh bla) and/or a gene encoding a fluorescent protein (RFP, BFP, YFP, or GFP). In some embodiments, the antibiotic resistance gene is cat, which encodes chloramphenicol acetyltransferase. Cells may be selected for resistance to chloramphenicol by culturing the cells in the presence of chloramphenicol. In some embodiments, the selection marker enables selection of cells expressing a protein of interest (e.g., a full-length transcription factor). As would be appreciated by one of ordinary skill in the art, the effective amount of a selection agent may vary depending on the host cell and phenotype of interest.

[0150] Positive selection markers are selection markers that confer a selective advantage to a host cell. In some embodiments, positive selection is the use of such selection markers to confer a growth or survival advantage to a cell comprising a protein of interest. In some embodiments, positive selection is used to identify cells in which a candidate peptide binds a target protein. Without being bound by a particular theory, protein splicing of the fusion proteins in the split intein-based selection system disclosed herein is dependent on the association of the candidate peptide with the target protein; therefore, in the absence of a binding interaction or when the binding interaction is weak, expression of the reporter gene is low. In some embodiments, a candidate peptide binder of a target protein increases expression of the reporter gene in a host cell comprising the split intein-based selection system disclosed herein by at least 10%, at least 20%, at least 30%, at least 40%, at 50%, at least 60%, at least 70%, at least 80%, at least 90%, at least 110%, at least 120%, at least 130%, at least 140%, at least 150%, at least 200%, at least 300%, at least 400%, at least 500%, at least 600%, at least 700%, at least 800%, at least 900%, or at least 100% relative to a control. In some embodiments, a control is a control peptide that has non-specific binding to the same target protein of interest. In some embodiments, a control is the level of expression of the candidate peptide binder in a host cell that comprises a split intein-based selection system with a control target protein that is not of interest.

[0151] Negative selection markers are selection markers that confer a selective disadvantage to a host cell. In some embodiments, negative selection is the use of such selection markers to confer a growth or survival disadvantage to a cell comprising an undesirable phenotype. Non-limiting examples of negative selection markers include Herpes Simplex Virus-1 Thymidine Kinase (HsvTK). Cells expressing HsvTK can be selected against by contacting cells with nucleotide 6-(β-D-2-deoxyribofuranosyl)-3,4-dihydro8H-pyrimido [4,5-c][1,2] oxazin-7-one (dP). Without being bound by a particular theory, expression of HsvTK alone without the addition of dP does not confer a growth disadvantage, which allows for temporal control of selection. As a non-limiting example, negative selection may be used to deplete host cells comprising candidate peptides that bind off-target proteins (identify candidates that non-specifically bind to a target protein of interest); the reporter gene may comprise a negative selection gene. For example, the split intein-based selection system described herein may be used with the candidate peptide and an off-target control protein in place of the target protein of interest to identify candidate peptides that bind to the off-target protein. In this embodiment, the inducible promoter may be operably linked to a gene encoding a negative selection marker and cells expressing the negative selection marker may be depleted by contacting the cells with the negative selection agent. Without being bound by a particular theory, the expression of the negative selection marker in this system is indicative of binding between the candidate peptide and the off-target control protein. In some embodiments, a reporter gene in the split intein-based selection system described herein comprises a negative selection marker to deplete cells that comprise an undesirable candidate peptide. As a non-limiting example, it may be desirable to select for peptide binders that specifically bind a target protein when the peptide is modified (e.g., comprising one or more post-translational modifications) but not when the peptide is unmodified. In some embodiments, the unmodified peptide is used in place of the candidate peptide in the split intein-based selection system described herein along with an inducible promoter operably linked to a negative selection marker and driving expression of the negative selection marker. The cells may be contacted with the negative selection agent to deplete cells with an unmodified peptide that binds to the target protein of interest. Without being bound by a particular theory, formation of a full-length transcription factor and subsequent expression of the full-length transcription factor would be dependent on the unmodified peptide binding to the target peptide in this system.

[0152] Expression of a reporter gene may be detected by any suitable method known in the art, including by analysis of RNA (e.g., reverse transcription-polymerase chain reaction (RT-PCR)), by analysis of protein levels (e.g., immunoassays), by analysis of enzyme activity (e.g., analysis of catalytic activity), by contacting cells with one or more selection agents, or by fluorescence analysis. A reporter protein may be detected by any known method, including via fluorescence microscopy, an immunoassay (including a western blot or an ELISA), or flow cytometry.

[0153] As one of ordinary skill in the art would appreciate, any transcriptional or translational output may be coupled with the first and second fusion proteins described herein.

[0154] In some embodiments, the intein-based selection system comprises a fusion protein with (i) a first fragment of a reporter protein, (ii) a first split intein, and (iii) a target protein, and another fusion protein that comprises (i) a candidate peptide, (ii) a second split intein, and (iii) a second fragment of the reporter protein. The first and second split inteins are complementary fragments, such that association of the first split intein with the second split intein promotes trans-splicing. In this embodiment, the presence of a full-length reporter protein is indicative of the candidate protein binding the target protein.

### Peptides

[0155] Ribosomally synthesized and post-translationally modified peptides (RiPPs) are a class of natural products that are modular and engineerable. In RiPP biosynthesis, the ribosome synthesizes a peptide using proteinogenic (i.e., amino acids that are biologically incorporated into proteins during translation) amino acids, and modifying enzymes subsequently bind to the peptide and modify it. Such post-translational modification introduces chemical diversity beyond the 20 standard amino acids, as well as structural diversity such as macrocyclization. Each modifying enzyme is constrained by a set of design rules, such as which amino acid(s) they can modify, the recognition site(s) (RSs) they will associate with, the distance (e.g., number of amino acids) between the RS and the amino acid residue(s) to be modified, and the amino acid context in which they can act (e.g., the amino acids in proximity to the target amino acid(s) that they modify). Synthetic peptides with particular activity (e.g., desired biological activity), and libraries thereof, can be constructed by incorporating the design constraints of one or a combination of modification enzymes into a peptide synthesis scheme.

[0156] In some embodiments, a RiPP comprises a leader amino acid sequence and a core amino acid sequence. In some embodiments, the leader and the core are connected via a cleavable linker (e.g., a protease-cleavable linker). In some embodiments, a RiPP comprises one or more (e.g., 1, 2, 3, 4, 5, 6, or more) recognition sites (RSs) for one or more distinct modification enzymes.

[0157] Aspects of the present disclosure relate to peptides for identification of binders to a target protein (e.g., candidate peptides or a plurality thereof) and peptides that may be useful in clinical applications. A candidate peptide is a peptide whose binding activity to a protein is being investigated. In some embodiments, a peptide comprises a sequence that is at least 60%, at least 70%, at least 80%, at least 90%, at least 91%, at least 92%, at least 93%, at least 94%, at least 95%, at least 96%, at least 97%, at least 98%, or at least 99% identical to SEQ ID NOs: 6-25 or 26-45, an amino acid sequence in Table 3 or any amino acid sequence disclosed herein, including fragments thereof.

[0158] The peptides described herein may be modified (e.g., the peptide may comprise a non-natural amino acid, a non-naturally occurring linkage, and/or a post-translational modification). In some embodiments, a modified peptide comprises a post-translational modification. In some embodiments, a modified peptide is produced recombinantly. In some embodiments, a modified peptide is produced synthetically. Without being bound by a particular theory, recombinant production of a modified peptide using a host cell may require expression of one or more protein modification enzymes. In some embodiments, the peptide is non-naturally occurring. In some embodiments, the peptide is naturally occurring.

[0159] Without being bound by a particular theory, a peptide comprising one or more modifications may be more stable (e.g., has reduced denaturation at a particular temperature), have increased bioavailability, and/or have increased solubility compared to a peptide not comprising the one or more modifications.

[0160] Non-limiting examples of post-translational modifications include formation of thioether bridges, formation of ester bridges, phosphorylation, glycosylation, acetylation, ubiquitylation/sumoylation, methylation, palmitoylation, myristoylation, prenylation, hydroxylation, GPI anchoring, ADP-ribosylation, pyrrolidone carboxylic acid, citrullination, S-nitrosylation, sulfation, amidation, nitration, oxidation, gamma-carboxyglutamic acid, topaquinone, lysine topaquinone, phosphopantetheine, quinone, hypusine, iodination, bromination, cysteine tryptophylquinone, formylation, and tryptophan tryptophylquinone.

[0161] In some embodiments, a peptide described herein is a ribosomally synthesized and post-translationally modified peptide (RiPP). RiPPs are ribosomally-produced peptides that comprise a post-translational modification. There are several subfamilies of RiPPs and RiPPs are grouped based on the biosynthetic machinery that produce the RiPP and structural characteristics. See, e.g., Table 1 below, which is based on Table 1 from Ortega and van der Donk, Cell Chem Biol. 2016 Jan. 21; 23(1):31-44; and Arnison et al., Nat Prod Rep. 2013 January;30(1):108-60.

[0162] In some embodiments, a modified peptide comprises two or more (e.g., at least 3, at least 4, at least 5, at least 6, at least 7, at least 8, at least 9, at least 10, at least 11, at least 12, at least 13, at least 14, at least 15, at least 16, at least 17, at least 18, at least 19, at least 20) non-contiguous amino acids that are linked. In some embodiments, a modified peptide comprises at least 1 pair, at least 2 pairs, at least 3 pairs, at least 4 pairs, at least 5 pairs, at least 6 pairs, at least 7 pairs, a least 8 pairs, at least 9 pairs, at least 10 pairs, at least 15 pairs, at least 20 pairs, at least 30 pairs, at least 40 pairs, or at least 50 pairs) of non-contiguous amino acids that are linked. As a non-limiting example, scaffold L1 in FIG. 3 comprises two pairs of non-contiguous amino acids that are linked. As will be understood by one of ordinary skill in the art, two or more amino acids may be linked as valency permits.

[0163] In some embodiments, a peptide comprises at least 1, at least 2, at least 3, at least 4, at least 5, at least 6, at least 7, at least 8, at least 9, at least 10, at least 11, at least 12, at least 13, at least 14, at least 15, at least 16, at least 17, at least 18, at least 19, at least 20, at least 21, at least 22, at least 23, a least 24, at least 25, at least 30, at least 40, at least 50, at least 60, at least 70, at least 80, at least 90, or at least 100 thioether bridges. In some embodiments, a peptide comprises at least 1, at least 2, at least 3, at least 4, at least 5, at least 6, at least 7, at least 8, at least 9, at least 10, at least 11, at least 12, at least 13, at least 14, at least 15, at least 16, at least 17, at least 18, at least 19, at least 20, at least 21, at least 22, at least 23, a least 24, at least 25, at least 30, at least 40, at least 50, at least 60, at least 70, at least 80, at least 90, or at least 100 ester bridges. In some embodiments, a peptide comprises a thioether bridge and an ester bridge.

[0164] As an example, lanthipeptides comprise Lan and/or MeLan thioether bis-amino acids. In some embodiments, a peptide is a lanthipeptide. In some embodiments, a lanthipeptide comprises scaffold Li: AACX₁X₂X₃X₄X₅X₆MPPX₇X₈X₉X₁₀X₁₁X₁₂C (SEQ ID NO: 1), wherein: X₆ and X₇ are each the amino acid S or T; X₁-X₅ and X₈-X₁₂ are each any amino acid; and the peptide comprises a thioether bridge that links C at position 3 to S or T at position 9 in SEQ ID NO: 1 and a thioether bridge that links S or T at position 13 to C at position 19 in SEQ ID NO: 1. See, e.g., L1 in FIG. 3.

[0165] In some embodiments, a peptide is a microviridin. Microviridins may comprise lactones made from Glu/Asp and Ser/Thr side chains and/or lactams made from Lys and Glu/Asp residues. In some embodiments, a microviridin comprises X₁PX₂TTX₃X₄TX₅X₆X₇EX₈X₉DX₁₀DEX₁₁X₁₂X₁₃ (SEQ ID NO: 2) (scaffold L2), wherein: X₂ is the amino acid H, Q, N, K, D, or E; X₆ is the amino acid F, L, S, I, M, T, V, or A; X₇ is the amino acid F, L, I, or V; X₁, X₃-X₅ and X₈-X₁₃ are each any amino acid; and the peptide comprises an ester bridge that links T at position 5 of SEQ ID NO: 2 to D at position 15 of SEQ ID NO: 2 and an ester bridge that links T at position 8 of SEQ ID NO: 2 to E at position 12 of SEQ ID NO: 2. See, e.g., L2 in FIG. 3.

[0166] In some embodiments, a peptide comprises a sactipeptide (ranthipeptide). Sactipeptides comprise one or more intramolecular thioether linkages between Cys side chains and α-carbons of other amino acids. In some embodiments, a sactipeptide comprises: X₁CX₂X₃X₄X₅X₆CX₇X₈X₉X₁₀X₁₁ (SEQ ID NO: 3) (scaffold L3), wherein: X₅ and X₁₀ are each the amino acid D or E; X₁-X₄, X₆-X₉, and X₁₁ are each any amino acid; and the peptide comprises a thioether bridge that links C at position 2 to D or E at position 6 of SEQ ID NO: 3 and a thioether bridge that links C at position 8 to D or E at position 12 of SEQ ID NO: 3. See, e.g., L3 in FIG. 3. In some embodiments, a peptide comprising scaffold L3 comprises a sequence that is at least 60%, at least 70%, at least 80%, at least 90%, at least 91%, at least 92%, at least 93%, at least 94%, at least 95%, at least 96%, at least 97%, at least 98%, or at least 99% identical to a sequence selected from SEQ ID NOs: 17-25.

[0167] In some embodiments, a sactipeptide comprises X₁CX₂X₃CX₄X₅X₆X₇X₈X₉ (SEQ ID NO: 4) (scaffold L4), wherein: X₄ and X₇ are each the amino acid D or E; X₁-X₃, X₅-X₆, and X₈-X₉ are each any amino acid; and the peptide comprises a thioether bridge that links C at position 2 to D or E at position 6 of SEQ ID NO: 4 and a thioether bridge that links C at position 5 to D or E at position 9 of SEQ ID NO: 4. See, e.g., L4 in FIG. 3. In some embodiments, a sactipeptide comprises X₁CX₂X₃X₄X₅X₆CX₇X₈CX₉X₁₀X₁₁X₁₂X₁₃ (SEQ ID NO: 5), wherein: X₅, X₉, and X₁₂ are each the amino acid D or E; X₁-X₄, X₆-X₈, X₁₀-X₁₁, and X₁₃ are each any amino acid; and the peptide comprises a thioether bridge that links the C at position 2 to D or E at position 6 of SEQ ID NO: 5, a thioether bridge that links C at position 8 of SEQ ID NO: 5 with D or E at position 12 of SEQ ID NO: 5, and a thioether bridge that links C at position 11 with D or E at position 15 of SEQ ID NO: 5. See, e.g., L5 in FIG. 3. In some embodiments, a peptide comprising scaffold L5 comprises a sequence that is at least 60%, at least 70%, at least 80%, at least 90%, at least 91%, at least 92%, at least 93%, at least 94%, at least 95%, at least 96%, at least 97%, at least 98%, or at least 99% identical to a sequence selected from SEQ ID NOS: 6-16.

[0168] In some embodiments, a peptide described herein has biological activity, e.g., antimicrobial activity. In some embodiments, peptides having antimicrobial activity are modified from RiPPs of microbiome bacteria from a subject, such as a human subject. Non-limiting examples of bacteria from which RiPPs can be modified to have antimicrobial activity include the Flavobacteria, Proteobacteria, Actinobacteria, Erysipelotrichia, Clostridia, Bacilli provided in FIG. 24, or the bacteria provided in FIG. 32A and FIG. 32D. In some embodiments, a peptide having antimicrobial activity (e.g., a modified RiPP) comprises at least 15 (e.g., 15, 16, 17, 18, 19, 20, 21, 22, 23, 24, 25, 26, 27, 28, 29, 30, 31, 32, 33, 34, 35, 36, 37, 39, 39, 40, 41, or 42) consecutive amino acids of the sequence GTFSX₁GX₂X₃X₄X₅X₆X₇X₈X₉X₁₀X₁₁GX₁₂DGVX₁₃X₁₄TX₁₅SHECHMNTWQFLX₁₆TCCS (SEQ ID NO: 88) or GX₁₂DGVX₁₃X₁₄TX₁₅SHECHMNTWQFL (SEQ ID NO: 938); wherein: X₁ is G or E; X₂ is W or T; X₃ is F or I; X₄ is T or S; X₅ is A or I; X₆ is I or T; X₇ is Q or L; X₈ is L or S; X₉ is T, V, or G; X₁₀ is L, Y, or S; X₁₁ is A, M, R, or G; X₁₂ is R, G, N, W, or K; X₁₃ is W, M, V, L or F; X₁₄ is F, H, C, P, or K; X₁₅ is G, L, W, V, or I; and X₁₆ is L, F, or A. In some embodiments, a peptide having antimicrobial activity (e.g., a modified RiPP) comprises a sequence that is at least 60%, at least 70%, at least 80%, at least 90%, at least 91%, at least 92%, at least 93%, at least 94%, at least 95%, at least 96%, at least 97%, at least 98%, or at least 99% identical to a sequence selected from GGWFTAIQLTLAGRCGNWFTGSFECTSNNVKCG (SEQ ID NO: 89); GGDGVMHTLTHECHMNTWQFLLTCC (SEQ ID NO: 90); GTFSEGTISITLSVYMGNDGKVCTWTVECQNNCSHKK (SEQ ID NO: 91); GSRWWQGVLPTVSHECRMNSFQHIFTCC (SEQ ID NO: 92); or GGKNGVFKTISHECHLNTWAFLATCCS (SEQ ID NO: 93). In some embodiments, a peptide having antimicrobial activity (e.g., a modified RiPP) comprises a sequence selected from GGWFTAIQLTLAGRCGNWFTGSFECTSNNVKCG (SEQ ID NO: 88); GGDGVMHTLTHECHMNTWQFLLTCC (SEQ ID NO: 90); GTFSEGTISITLSVYMGNDGKVCTWTVECQNNCSHKK (SEQ ID NO: 91); GSRWWQGVLPTVSHECRMNSFQHIFTCC (SEQ ID NO: 92); and GGKNGVFKTISHECHLNTWAFLATCCS (SEQ ID NO: 93). In some embodiments, a peptide having antimicrobial activity (e.g., a modified RiPP) comprises a sequence that is at least 60%, at least 70%, at least 80%, at least 90%, at least 91%, at least 92%, at least 93%, at least 94%, at least 95%, at least 96%, at least 97%, at least 98%, or at least 99% identical to a sequence selected from IDTLDYEISHQELSGKSAAGWQTAFRLTMQGRCGGVFTLSYECATPHVSCG (SEQ ID NO: 97); GGWYTAFKLTLAGRCGLCFTCSYECTSNNVHC (SEQ ID NO: 98); and GWFTAIQLTLAGRCGNWFTGSFECTSNNVKCG (SEQ ID NO: 99). In some embodiments, a peptide having antimicrobial activity (e.g., a modified RiPP) comprises a sequence selected from IDTLDYEISHQELSGKSAAGWQTAFRLTMQGRCGGVFTLSYECATPHVSCG (SEQ ID NO: 97); GGWYTAFKLTLAGRCGLCFTCSYECTSNNVHC (SEQ ID NO: 98); and GWFTAIQLTLAGRCGNWFTGSFECTSNNVKCG (SEQ ID NO: 99). In some embodiments, a peptide having antimicrobial activity (e.g., a modified RiPP) comprises a sequence that is at least 60%, at least 70%, at least 80%, at least 90%, at least 91%, at least 92%, at least 93%, at least 94%, at least 95%, at least 96%, at least 97%, at least 98%, or at least 99% identical to a sequence selected from SEQ ID NOs: 115-147, 758-783, 820, and 821. In some embodiments, a peptide having antimicrobial activity (e.g., a modified RiPP) comprises a sequence of any one of SEQ ID NOs: 115-147, 758-783, 820, and 821. In some embodiments, a peptide having antimicrobial activity comprises at least 15 (e.g., 16, 17, 18, 19, 20, 21, 22, 23, 24, 25, 26, 27, 28, 29, 30, or more) consecutive amino acids of any one of Lacticin 481, AMK287, AMK417, AMK419, AMK687, or AMK691, or of of any one of SEQ ID NOs: 115-147, 758-783, 820, or 821. In some embodiments, a peptide having antimicrobial activity (e.g., a modified RiPP) comprises at least 15 (e.g., 15, 16, 17, 18, 19, 20, 21, 22, 23, 24, 25, 26, 27, 28, 29, 30, 31, 32, 33, or 34) consecutive amino acids of the sequence GGGWX₁TAFX₂LTLAGRCGX₃X₄FTX₅SYECTSNNVX₆CG (SEQ ID NO: 94), wherein: X₁ is F, Y, or Q; X₂ is Q, K, or R; X₃ is N, L, or G; X₄ is W, C, or V; X₅ is G, C, or L; X₆ is K, H, or S. In some embodiments, a peptide having antimicrobial activity (e.g., a modified RiPP) comprises a sequence that is at least 60%, at least 70%, at least 80%, at least 90%, at least 91%, at least 92%, at least 93%, at least 94%, at least 95%, at least 96%, at least 97%, at least 98%, or at least 99% identical to a sequence selected from GGGWFTAIQLTLAGRCGNWFTGSFECTSNNVKCG (SEQ ID NO: 100), GGGWYTAFKLTLAGRCCGLCFTCSYECTSNNVHC (SEQ ID NO: 101), and GWQTAFRLTMQGRCGGVFTLSYECATPHVSCG (SEQ ID NO: 96). In some embodiments, a peptide having antimicrobial activity (e.g., a modified RiPP) comprises a sequence selected from GGGWFTAIQLTLAGRCGNWFTGSFECTSNNVKCG (SEQ ID NO: 100), GGGWYTAFKLTLAGRCCGLCFTCSYECTSNNVHC (SEQ ID NO: 110), and GWQTAFRLTMQGRCGGVFTLSYECATPHVSCG (SEQ ID NO: 96).

[0169] In some embodiments, a peptide having antimicrobial activity (e.g., a modified RiPP) comprises at least 15 (e.g., 15, 16, 17, 18, 19, 20, 21, 22, 23, 24, 25, 26, 27, 28, 29, 30, 31, 32, 33, or 34) consecutive amino acids of the sequence GSX₁GX₂X₃GVX₄X₅TX₆SHECHMNTWQFLX₇TCCS (SEQ ID NO: 95), wherein: X₁ is R or G; X₂ is G, W, or K; X₃ is D, Q, or N; X₄ is M, L, or F; X₅ is H, P, or K; X₆ is L, V, or I; and X₇ is L, F, or A;. In some embodiments, a peptide having antimicrobial activity (e.g., a modified RiPP) comprises a sequence that is at least 60%, at least 70%, at least 80%, at least 90%, at least 91%, at least 92%, at least 93%, at least 94%, at least 95%, at least 96%, at least 97%, at least 98%, or at least 99% identical to a sequence selected from GGDGVMHTLTHECHMNTWQFLLTCC (SEQ ID NO: 90), GSRWWQGVLPTVSHECRMNSFQHIFTCC (SEQ ID NO: 92), and GGKNGVFKTISHECHLNTWAFLATCCS (SEQ ID NO: 93). In some embodiments, a peptide having antimicrobial activity (e.g., a modified RiPP) comprises a sequence selected from GGDGVMHTLTHECHMNTWQFLLTCC (SEQ ID NO: 90), GSRWWQGVLPTVSHECRMNSFQHIFTCC (SEQ ID NO: 92), and GGKNGVFKTISHECHLNTWAFLATCCS (SEQ ID NO: 93).

[0170] In some embodiments, a peptide having antimicrobial activity (e.g., a modified RiPP) comprises at least 15 (e.g., 15, 16, 17, 18, 19, 20, 21, 22, 23, 24, 25, 26, 27, 28, 29, 30, 31, 32, 33, 34, 35, 36, 37, 38, 39, 40, 41, or 42) consecutive amino acids of the sequence GWX₁WGSYRDX₂YGALRGPNX₃X₄FVGX₅GGX₆X₇X₈X₉X₁₀X₁₁X₁₂X₁₃X₁₄SWRLVPR (SEQ ID NO: 102), wherein: X₁ is I, F, L, or Y; X₂ is V or I; X₃ is P, S, T, or K; X₄ is P, G, N, or R; X₅ is L, G, A, or R; X₆ is V, F, or S; X₇ is P, T, or S; X₈ is P, G, or E; X₉ is G or W; X₁₀ is G or R; X₁₁ is V or L; X₁₂ is S or V; X₁₃ is G or P; and X₁₄ is G or R. In some embodiments, a peptide having antimicrobial activity (e.g., a modified RiPP) comprises a sequence that is at least 60%, at least 70%, at least 80%, at least 90%, at least 91%, at least 92%, at least 93%, at least 94%, at least 95%, at least 96%, at least 97%, at least 98%, or at least 99% identical to a sequence selected from GLIYGKYRDVLSGARLVTPPEVALRLVPR (SEQ ID NO: 103), GWFWGSYRDIFGALRGPNSGFEGGGGFTGGGVSGGSWRLVPR (SEQ ID NO: 104), GWLWGSYRDVYGVWHGPRTNFNGAGGSSEWRLVPR (SEQ ID NO: 105), and GWYWGNRRDIYGALRYANKRLVPR (SEQ ID NO: 106). In some embodiments, a peptide having antimicrobial activity (e.g., a modified RiPP) comprises a sequence selected from GLIYGKYRDVLSGARLVTPPEVALRLVPR (SEQ ID NO: 103), GWFWGSYRDIFGALRGPNSGFEGGGGFTGGGVSGGSWRLVPR (SEQ ID NO: 104), GWLWGSYRDVYGVWHGPRTNFNGAGGSSEWRLVPR (SEQ ID NO: 105), and GWYWGNRRDIYGALRYANKRLVPR (SEQ ID NO: 106).

[0171] In some embodiments, a peptide having antimicrobial activity (e.g., a modified RiPP) comprises a sequence that is at least 60%, at least 70%, at least 80%, at least 90%, at least 91%, at least 92%, at least 93%, at least 94%, at least 95%, at least 96%, at least 97%, at least 98%, or at least 99% identical to GVGYbbYWGILPLVbKNPQIAPVaENbVKARLL (SEQ ID NO: 107), wherein ‘b’ is dehydrobutyrine and ‘a’ is dehydroalanine, and wherein a thioether bridge connects the dehydrobutyrine at position 15 to the alanine at position 21, and a thioether bridge connects the dehydrobutyrine at position 27 to the alanine at position 30. In some embodiments, a peptide having antimicrobial activity (e.g., a modified RiPP) comprises the sequence GVGYbbYWGILPLVbKNPQIAPVaENbVKARLL (SEQ ID NO: 107), wherein ‘b’ is dehydrobutyrine and ‘a’ is dehydroalanine, and wherein a thioether bridge connects the dehydrobutyrine at position 15 to the alanine at position 21, and a thioether bridge connects the dehydrobutyrine at position 27 to the alanine at position 30.

[0172] In some embodiments, a peptide having antimicrobial activity (e.g., a modified RiPP) comprises a sequence that is at least 60%, at least 70%, at least 80%, at least 90%, at least 91%, at least 92%, at least 93%, at least 94%, at least 95%, at least 96%, at least 97%, at least 98%, or at least 99% identical to a sequence provided in Table 12 (SEQ ID NOs: 115-147).

[0173] In some embodiments, a peptide having antimicrobial activity is selectively active against a particular class, genera, species, or strain of bacteria. In some embodiments, a peptide having antimicrobial activity does not kill commensal bacteria of a subject. In some embodiments, a peptide having antimicrobial activity kills pathogenic bacteria. In some embodiments, a peptide having antimicrobial activity is selective towards pathogenic bacteria over commensal bacteria. In some embodiments, a peptide having antimicrobial activity is selective towards bacteria of a first class, genera, species, or strain over bacteria of a second class, genera, species or strain. In some embodiments, being selective towards a first population of bacteria over a second population of bacteria means the peptide kills bacteria of the first population of bacteria at a concentration that is at least 5% lower (e.g., at least 10% lower, 15% lower, 20% lower, 25% lower, 30% lower, 35% lower, 40% lower, 45% lower, 50% lower, 55% lower, 60% lower, 65% lower, 70% lower, 75% lower 80% lower, 85% lower, 86% lower, 87% lower, 88% lower, 89% lower, 90% lower, 91% lower, 92% lower, 93% lower, 94% lower, 95% lower, 96% lower, 97% lower, 98% lower, or 99% lower) than the concentration that is required to kill bacteria of the second population. In some embodiments, being selective towards a first population of bacteria over a second population of bacteria means the peptide is capable of killing bacteria of the first population, but is unable to kill bacteria of the second population.

[0174] In some embodiments, a peptide having antimicrobial activity (e.g., a modified RiPP) disclosed herein comprises one or more post-translational modifications, such as modifications effected by one or more enzymes listed in Tables 5, 7, 8, 13, 14, and 17. Possible peptide post-translational modifications include, but are not limited to, phosphorylation (e.g., of serine, threonine, or tyrosine residues); glycosylation (e.g., N-glycosylation, O-glycosylation, glypiation, C-glycosylation, and phosphoglycosylation); ubiquitylation/ubiquitination; S-nitrosylation; methylation (e.g., N-methylation or O-methylation); N-acetylation; lipidation (e.g., C-terminal glycosyl phosphatidylinositol (GPI) anchor, N-terminal myristoylation, S-myristoylation, or S-prenylation); deamidation; eliminylation; prenylation; ADP-ribosylation; hydroxylation; polypeptide backbone modifications (e.g., stereoisomerization, dehydration, oxidation, cyclization), and any other post-translational modifications disclosed herein. Post-translational modifications are described further in Müller Biochemistry 2018, 57(2):177-187 (doi: 10.1021/acs.biochem.7b00861) and deGruyter et al. Biochemistry 2017, 56(30):3863-3873 (doi: 10.1021/acs.biochem.7b00536).

[0175] In some embodiments, one or more serine (S) and/or cysteine (C) residues of a peptide having antimicrobial activity disclosed herein is replaced with a dehydroalanine (e.g., by dehydration of a serine or cysteine). In some embodiments, one or more threonine (T) residues of a peptide having antimicrobial activity disclosed herein is replaced with a dehydrobutyrine (e.g., by dehydration of a threonine). In some embodiments, a peptide having antimicrobial activity (e.g. a modified RiPP) disclosed herein comprises one or more thioether bridges, one or more thioester bridges, and/or one or more other bridges. Any modified peptide disclosed herein can comprise any combination of post-translational modifications described herein (e.g., one or more dehydrated amino acids, one or more thioether bridges, one or more thioester bridges, and/or one or more other bridges).

[0176] Despite the structural diversity of RiPPs, RiPP biosynthesis generally begins with production of a precursor peptide by ribosomes; the precursor peptide generally comprises an N-terminal leader sequence and a C-terminal core sequence that comprises sites for post-translational modification. In some embodiments, biosynthesis requires a C-terminal recognition sequence. The leader sequence recruits the biosynthetic machinery and is, in some embodiments, cleaved by a peptidase to form a mature peptide. In some embodiments, a protein modification enzyme is a peptidase that cleaves the leader peptide.

[0177] In some embodiments, one or more protein modification enzymes (e.g., at least 1, at least 2, at least 3, at least 4, at least 5, at least 6, at least 7, at least 8, at least 9, or at least 10) protein modification enzymes may be expressed in a cell to produce a modified peptide. In some embodiments, the protein modification enzyme is expressed from a heterologous nucleic acid. The expression of one or more protein modification enzymes may be under the control of an inducible promoter.

[0178] Protein modification enzymes including RiPP synthesis enzymes are known. As a non-limiting example, Prochlorosin (ProcM) is a member of the enzyme class that installs the macrocyclic thioether linkages that give rise to lanthipeptides. ProcM engages in dehydration-based chemistry that targets side chain serine/threonine residues. ProcA is a natural peptide substrate for ProcM. TgnB is a member of the enzyme class that installs the macrocyclic ester linkages that give rise to microviridins. TgnA is a natural peptide substrate for the modifying enzyme, TgnB. PapB is a member of the enzyme class that installs the macrocyclic thioether linkages that give rise to ranthipeptides, or sactipeptides. Freyrasin (PapB) engages in radical-based chemistry that targets main chain carbon atoms of aspartate/glutamate residues. LynD is a cyanobactin cyclodehydratase (PDB ID 4V1T). Additional non-limiting examples of protein modification enzymes including RiPP synthesis enzymes are provided in Table 7. See also, e.g., Ortega and van der Donk, Cell Chem Biol. 2016 Jan. 21; 23(1): 31-44. In some embodiments, a protein modification enzyme comprises a sequence that is at least 60%, at least 70%, at least 80%, at least 90%, at least 91%, at least 92%, at least 93%, at least 94%, at least 95%, at least 96%, at least 97%, at least 98%, or at least 99% identical to a sequence selected from SEQ ID NOs: 80-83, 174, 176, 179, 180, 183, 185, 187, 188, 190, 192, 247, 249-251, 253, 255, 256, 258, 262, 264, 265, 267, 270, 271, 274, 275, 279-281, 285, 289, 290, 292, 295, 296, 298, 300-303, 305, 308-310, 312, 313, 316, 318-322, 325, 327, 330, 332, 334, 335, 337, 338, 342, 343, 346, 349, 350, 354, 356, 360, 362, and 363. In some embodiments, a protein modification enzyme comprises a sequence selected from SEQ ID NOs: 80-83, 174, 176, 179, 180, 183, 185, 187, 188, 190, 192, 247, 249-251, 253, 255, 256, 258, 262, 264, 265, 267, 270, 271, 274, 275, 279-281, 285, 289, 290, 292, 295, 296, 298, 300-303, 305, 308-310, 312, 313, 316, 318-322, 325, 327, 330, 332, 334, 335, 337, 338, 342, 343, 346, 349, 350, 354, 356, 360, 362, and 363. See, e.g., Table 4, Table 7, Table 8, Table 9, and Table 17.

[0179] In some embodiments, the split intein-based selection methods described herein comprise sequencing to identify the candidate peptide in the host cell. In some embodiments, a host cell comprises a plasmid encoding the candidate peptide and the plasmid may be sequenced. Non-limiting examples of sequencing methods include next-generation sequence (NGS), nanopore sequencing, and Sanger sequencing.

TABLE 1
Non-limiting examples of RiPP modified peptides.

| RiPP Subfamily | Defining Features |
|---|---|
| Amatoxins and | N-to-C cyclized peptides produced by fungi |
| Phallotoxins | |
| Autoinducing | Peptides containing a cyclic ester or a thioester. |
| peptides | |
| Bacterial head-to- | N-to-C cyclized peptides differing from cyanobactins in the biosynthetic machinery employed |
| tail cyclized | for macrocyclization |
| peptides | |
| Bottromycins | An N-terminal macrocyclic amidine |
| | Use a C-terminal follower peptide instead of N-terminal leader peptide. |
| | Use a C-terminal follower peptide instead of N-terminal leader peptide. |
| Conopeptides | Venom peptides produced by snails. The degree and type of PTMs varies. |
| Cyanobactins | N-to-C macrocyclic peptides produced by cyanobacteria. |
| | Sometimes further decorated with azole(in)es and/or prenylations. |
| Cyclotides | N-to-C cyclized peptides produced by plants containing a cysteine knot composed of three |
| | disulfides |
| Glycocins | Glycosylated antimicrobial peptides |
| Lanthipeptides | Lan and/or MeLan thioether bis-amino acids |
| Lasso peptides | An N-terminal macrolactam with the C-terminal tail threaded through the ring. |
| Linaridins | Dehydroamino acids but lacking Lan/MeLan |
| Linear azol(in)e- | Linear peptides containing (methyl)oxazol(in)e or/and thiazol(in)e heterocycles |
| containing | |
| peptides | |
| Methanobactin | Peptidic chelators used by methanotrophic bacteria |
| Microcins | Produced by members of the Enterobacteriaceae Family. |
| | Include lasso peptide and LAP families |
| Microviridins | Lactones made from Glu/Asp and Ser/Thr side chains and/or lactams made from Lys and |
| | Glu/Asp residues |
| Orbitides | N-to-C cyclized peptides produced by plants lacking disulfides |
| Proteusins | Linear peptides containing D-amino acids and C-methylations |
| Pyrroloquinoline | Small molecules generated from the post-translational modification of a precursor peptide or |
| quinone (PQQ), | protein. |
| Pantocin, and | |
| Thyroid hormones | |
| Sactipeptides | Intramolecular thioether linkages between Cys side chains and α-carbons of other amino acids |
| (Ranthipeptides) | |
| Streptide | A Trp-to-Lys carbon-carbon cross link |
| Thioamides | Peptides containing thioamide linkages installed post-translationally |
| Thiopeptides | A central six-membered nitrogen-containing ring |
| | Additional PTMs include dehydrations and cyclodehydrations |

TABLE 7
Non-limiting examples of peptide modifying enzymes

| Protein | | | |
|---|---|---|---|
| modifi- | | | |
| cation | | | Peptide |
| enzyme | Enzyme | | interaction |
| name | class | Modification facilitated | mechanism |
| TgnB | lactone cyclase | [chemical structure] | Leader- dependent |
| PaaA | glu-glu cyclase | [chemical structure] | Leader- dependent |
| PlpXY | tyrosine excisionase | [chemical structure] | Leader- dependent |
| LynD | thiazoline cyclase | [chemical structure] | Leader- dependent |
| LasF | carboxylic acid methyl- transferase | [chemical structure] | Tailoring |
| PalS | cysteine glycosyl- transferase | [chemical structure] | Tailoring |
| EpiD | de- carboxylase | [chemical structure] | Tailoring |
| ThcoK | serine kinase | [chemical structure] | Tailoring |
| PadeK | serine kinase | [chemical structure] | Tailoring |

### Methods of Engineering RiPPs and RiPP Libraries

[0180] Provided herein are methods for engineering RiPPs, such as to develop non-naturally occurring RiPPs with desired properties. Both the leader and core sequences of a RiPP can be engineered based on the methods provided. In a leader sequence, recognition site(s) (RS) for protein modifying enzymes can be engineered (e.g., added, removed, optimized, or moved), such as to enable the use of the corresponding protein modifying enzyme to incorporate a particular post-translational modification to a peptide, or to prevent a particular protein modifying enzyme from acting on a given RiPP. In a core sequence, the amino acid sequence can be engineered, such as to facilitate post-translational modification by a particular protein modifying enzyme.

[0181] The amino acid sequence of a RiPP (including its leader and core sequences, as well as any additional amino acids within the RiPP) determine which protein modifying enzymes interact with the RiPP. Leader-dependent protein modifying enzymes associate with an RS within the leader sequence of a RiPP, and facilitate modification of an amino acid or amino acids within the core sequence. Tailoring protein modification enzymes associate with a particular amino acid or amino acids within the core sequence of a RiPP, and facilitate modification of one or more of those amino acids.

[0182] To engineer a RiPP, e.g., so as to include a particular set of post-translational modifications on a peptide having a particular amino acid sequence, the protein modification enzymes that facilitate the particular set of post-translational modifications are first identified. Consensus leader RS sequences for each leader-dependent enzyme are then compiled. Each leader RS sequence is then incorporated (e.g., by encoding in a nucleic acid sequence to be translated into the RiPP) into the leader sequence of the engineered RiPP. In embodiments in which one or all of the RS sequences for a given engineered RiPP have constraints on the distance between the RS and the amino acid(s) to be modified, each RS is placed in the leader sequence according to its respective constraint(s). An optimized leader sequence can be identified by screening candidate leaders and calculating a position score (e.g. by quantifying the amount of peptide having the desired modification pattern for each candidate leader sequence and identifying the leader sequence generating the highest yield of modified peptide). A non-limiting example of this screening process to identify optimized leader sequences is demonstrated in FIGS. 10A-10E and in FIG. 37D. The engineered RiPP is then expressed in a host cell concurrently with the protein modification enzymes, thereby synthesizing the engineered RiPP comprising the combination of post-translational modifications. In some embodiments, the engineered RiPP is expressed from a plasmid comprising a nucleic acid sequence encoding the leader and core amino acid sequence of the RiPP. In some embodiments, the protein modification enzymes are expressed from a plasmid or a set of plasmids comprising nucleic acid sequences encoding the enzymes. In some embodiments, the engineered RiPP and protein modification enzymes are expressed from a bacterial genome, such as an E. coli Marionette genome. In some embodiments, the engineered RiPP is expressed under the control of an inducible promoter. In some embodiments, each protein modification enzyme is expressed under the control of independently inducible promoters (i.e., each enzyme is controlled by an orthogonal promoter).

[0183] The RiPP engineering method provided herein enables the synthesis of a given peptide comprising a particular amino acid sequence with a specific combination of post-translational modifications. Biosynthesis using engineered RiPPs, rather than chemical or other conventional synthesis mechanisms, has one or more benefits, including but not limited to increased yield, decreased cost, and decreased complexity of the synthesis relative to alternative synthesis methods (e.g., chemical synthesis).

[0184] To engineer a RiPP, it may also be desirable to build a library of RiPPs to be screened with a particular protein modification enzyme or a particular combination of protein modification enzymes to identify preferred RiPPs (e.g., having a particular desired property or combination of properties) that comprise the desired post-translational modifications. Degenerate peptide libraries (i.e., libraries in which each amino acid of each member of the library is chosen randomly from all 20 natural amino acid options) can be designed, but have the disadvantage of being too large to be screened by conventional means (or in some instances are too large to be synthesized). For example, a degenerate library of peptides of 8 amino acids in length comprises peptides with 2.56×10¹⁰ distinct amino acid sequences, a number which is impossible or unfeasible to synthesize and/or screen. Such libraries are either impossible or unfeasible to synthesize and/or screen based on cost (sequencing, materials/reagents, etc.), time, or other considerations. As such, provided herein are libraries of RiPPs comprising a plurality of peptide members defined by a particular amino acid sequence motif. A library of RiPPs, in some embodiments, comprises peptides that are each 5-100 amino acids (e.g., 10-100, 10-90, 10-80, 10-70, 10-60, 10-50, 10-40, 10-30, 10-20, 20-100, 20-90, 20-80, 20-70, 20-60, 20-50, 20-40, 20-30, 30-100, 30-90, 30-80, 30-70, 30-60, 30-50, 30-40, 40-100, 40-90, 40-80, 40-70, 40-60, 40-50, 50-100, 50-90, 50-80, 50-70, 50-60, or any range or combination thereof) in length. A library, in some embodiments, comprises peptides that are each defined by a particular amino acid motif X₁X₂X₃X₄ . . . Xₙ, wherein n is the number of amino acids within the peptide (i.e., the length of the peptide), wherein each of X₁-Xₙ is independently chosen from 1, 2, 3, 4, 5, 6, 7, 8, 9, 10, 11, 12, 13, 14, 15, 16, 17, 18, 19, or 20 amino acids, and wherein at least one of X₁-Xₙ (e.g., 1, 2, 3, 4, 5, 6, 7, 8, 9, or all of X₁-Xₙ) is chosen from fewer than 20 amino acids. In some embodiments, at least one of X₁-Xₙ is restricted to a single amino acid. As a non-limiting example, X₁ may be chosen from 3 amino acids, X₂ may be chosen from 7 amino acids, X₃ may be chosen from 2 amino acids, and so on. In some embodiments, the amino acid motif X₁X₂X₃X₄ . . . Xₙ is determined to be susceptible to modification by 1, 2, 3, 4, 5, 6, 7, 8, or more distinct protein modification enzymes. In some embodiments, the plurality of peptides of the library do not have random amino acid sequences.

[0185] In some embodiments, a library comprises peptides defined by a particular amino acid motif determined to be susceptible to modification by 1, 2, 3, 4, 5, 6, 7, 8, or more distinct protein modification enzymes. In some embodiments, less than 100% (e.g., less than 95%, less than 90%, less than 85%, less than 80%, less than 75%, less than 70%, less than 65%, less than 60%, less than 55%, less than 50%, less than 45%, less than 40%, less than 35%, less than 30%, less than 25%, less than 20%, less than 15%, less than 10%, less than 5%, less than 4%, less than 3%, less than 2%, or less than 1%) of the members of the peptide library are capable of being fully modified by the protein modification enzymes to which the amino acid motif was determined to be susceptible. In some embodiments, at least 1% (e.g., at least 2%, at least 3%, at least 4%, at least 5%, at least 10%, at least 15%, at least 20%, at least 25%, at least 30%, at least 35%, at least 40%, at least 45%, at least 50%, at least 55%, at least 60%, at least 65%, at least 70%, at least 75%, at least 80%, at least 85%, at least 90%, or at least 95%) of the members of the peptide library are capable of being fully modified by the protein modification enzymes to which the amino acid motif was determined to be susceptible.

[0186] In some embodiments, each member of a library disclosed herein comprises a SUMO tag. In some embodiments, each member of a library disclosed herein comprises a SUMO tag at its 5′ end. In some embodiments, each member of a library disclosed herein comprises a SUMO tag at its 3′ end. In some embodiments, each member of a library disclosed herein comprises a SUMO tag and a histidine tag at its 5′ end (e.g., the member comprises the structure [histidine tag]-[SUMO tag]-peptide or [SUMO tag]-[histidine tag]-peptide). In some embodiments, each member of a library disclosed herein comprises a SUMO tag and a histidine tag at its 3′ end (e.g., the member comprises the structure peptide-[histidine tag]-[SUMO tag] or peptide-[SUMO tag]-[histidine tag]-peptide). In some embodiments, each member of a library disclosed herein comprises a SUMO tag and a histidine tag at its 5′ end or at its 3′ end. In some embodiments, a histidine tag is a hexahistidine tag. In some embodiments, each member of a library disclosed herein comprises a tobacco etch virus protease (TEVp) cleavage site, or each member comprises two TEVp cleavage sites. In some embodiments, each member of a library disclosed herein comprises a TEVp cleavage site in between a RiPP peptide and a SUMO tag (e.g., the member comprises the structure peptide-[TEVp site]-[SUMO tag] or [SUMO tag]-[TEVp site]-peptide).

[0187] In some embodiments, a plurality of host cells comprises a library of peptides disclosed herein. In some embodiments, each host cell comprises a peptide of the library (e.g., each host cell comprises a peptide of the library and the peptide comprised by each host cell is independent of the peptides comprised by each other host cell). In some embodiments, each host cell is a bacterial cell. In some embodiments, each host cell comprises a nucleic acid sequence encoding the peptide. In some embodiments, each host cell further comprises a protein modifying enzyme. In some embodiments, the protein modifying enzyme is encoded by a nucleic acid sequence comprised by the host cell.

[0188] In some embodiments, a library is synthesized in a plurality of host cells. For example, in some embodiments, each member of the library is synthesized in a separate host cell. In some embodiments, each host cell is a bacterial cell. In some embodiments, a library is synthesized in a population of bacteria. In some embodiments, each bacterium of the population expresses a single member of the library. In some embodiments, each member of the library is synthesized in a host cell in which one or more protein modifying enzymes are also expressed.

[0189] In some embodiments, a library is capable of being screened by methods disclosed herein (e.g., using split-intein based selection). In some embodiments, screening of a library disclosed herein identifies one or more peptides with a desired functional property (e.g., a desired biological property). In some embodiments, screening of a library disclosed herein identifies one or more peptides with antimicrobial activity. In some embodiments, screening of a library disclosed herein identifies one or more peptides with binding activity to a target protein.

### Target Proteins

[0190] The target protein may be any protein of interest. In some embodiments, a target protein is a cell surface receptor, antigen, transmembrane protein, glycoprotein, glycolipid or any other cell surface macromolecule. In some embodiments, the target protein is a viral protein or a fragment thereof. In some embodiments, the target protein comprises a receptor binding domain (RBD) from a coronavirus protein. In some embodiments, the coronavirus is 229E (alpha coronavirus), NL63 (alpha coronavirus), OC43 (beta coronavirus), HKU1 (beta coronavirus), MERS-CoV (the beta coronavirus that causes Middle East Respiratory Syndrome, or MERS), SARS-CoV (the beta coronavirus that causes severe acute respiratory syndrome, or SARS), or SARS-CoV-2 (the novel coronavirus that causes coronavirus disease 2019, or COVID-19). In some embodiments, the target protein is a bacterial protein or a fragment thereof. In some embodiments, the target protein is a bacterial enzyme. In some embodiments, the target protein is a bacterial outer-membrane protein. In some embodiments, the target protein is a bacterial toxin. In some embodiments, the target protein is a bacterial structural protein. In some embodiments, the target protein is a bacterial polymerase. In some embodiments, the target protein is a bacterial transcription regulator.

[0191] In some embodiments, the target protein is SARS-CoV-2 receptor binding domain (RBD) of the Spike protein. Spike protein is a surface glycoprotein that binds to angiotensin I converting enzyme 2 (ACE2) to promote viral entry. The al helix of ACE2 makes most of the binding contacts with the RBD and is provided as SEQ ID NO: 72.

[0192] In some embodiments, the target protein comprises a sequence that is at least 60%, at least 70%, at least 80%, at least 90%, at least 91%, at least 92%, at least 93%, at least 94%, at least 95%, at least 96%, at least 97%, at least 98%, or at least 99% identical to SEQ ID NO: 71 (RBD). In some embodiments, the target protein comprises the amino acid sequence of SEQ ID NO: 71.

[0193] In some embodiments, the target protein comprises a sequence that is at least 60%, at least 70%, at least 80%, at least 90%, at least 91%, at least 92%, at least 93%, at least 94%, at least 95%, at least 96%, at least 97%, at least 98%, or at least 99% identical to SEQ ID NO: 72 (al helix of ACE2). In some embodiments, the target protein comprises the amino acid sequence of SEQ ID NO: 72.

[0194] Non-limiting examples of known cellular receptors include ACVR2A, EGFR/HER1, HER2/ERBB2, ERBB3/HER3, CD32a/FCGR2A/Fc gamma RIIa, CD32b/FCGR2B/Fc gamma RIIb, CD16a/Fc gamma RIIIa, CD16b/Fc gamma RIII, CD155/PVR, TNFR1/TNFRSF1A/CD120a, TNFR2/TNFRSF1B/CD120b, 4-1BB/TNFRSF9/CD137, TRAIL R2/CD262/TNFRSF10B, TRAIL R4/CD264/TNFRSF10D, TNFRSF11A, TRAIL R1/CD261/TNFRSF10A, TRAILR3/TNFRSF10C, TACI/TNFRSF13B(CD267) HVEM/TNFRSF14/CD270, BCMA/TNFRSF17/CD269, GITR/TNFRSF18/CD357, FGFR2/CD332, CD23/FCER2, FCRL1/FCRH1, TIM-3/HAVCR2, IL1RL1/IL-1 R4, IL17RA/IL-17RA/CD217, IL-4R/CD124, IL7R/IL-7R/CD127, TrkA/NTRK1, PDGFRB/CD140b, TREM-2/TREM2, ACVR2B/Activin RIIB, FCGRT & B2M, CD89/FCAR, IL3RA/CD123, IGF1R/CD221/IGF-I R, Insulin Receptor/INSR/CD220, LILRB2/ILT4/LIR-2, VEGFR2/KDR/Flk-1/CD309, MCSF Receptor/CSF1R/CD115, EPHA3/Eph Receptor A3, CD16-2/FCGR4, FcERI/FCER1A, TIM-1/KIM-1/HACVR, IL6R/IL-6R/CD126, LILRB4/CD85k/ILT3, IL2RA/IL-2RA/CD25, CD122/IL-2RB, LDLR/LDL R/LDL Receptor, CD112/Nectin-2/PVRL2, and TFRC/CD71.

[0195] A peptide described herein may have a particular binding affinity for a target protein. Binding affinity is the apparent association constant or K_{A}. The K_{A} is the reciprocal of the dissociation constant (K_{D}). The peptides identified by the methods described herein may have a binding affinity (K_{D}) of at least 10⁻⁵, 10⁻⁶, 10⁻⁷, 10⁻⁸, 10⁻⁹, 10⁻¹⁰ M, or lower for a target protein. An increased binding affinity corresponds to a decreased K_{D}. Higher affinity binding of a peptide for a first protein relative to a second protein can be indicated by a higher K_{A} (or a smaller numerical value K_{D}) for binding the first protein than the K_{A} (or numerical value K_{D}) for binding the second protein. In such cases, the peptide has specificity for the first protein (e.g., a first protein in a first conformation or mimic thereof) relative to the second protein (e.g., the same first protein in a second conformation or mimic thereof; or a second protein). In some embodiments, the peptides described herein have a higher binding affinity (a higher K_{A} or smaller K_{D}) to an appropriate protein as compared to the binding affinity of the same type of peptide produced using naturally occurring secretion signal peptides. Differences in binding affinity (e.g., for specificity or other comparisons) can be at least 1.5, 2, 3, 4, 5, 10, 15, 20, 37.5, 50, 70, 80, 91, 100, 500, 1000, 10,000 or 10⁵ fold. In some embodiments, any of the peptides produced as provided herein may be further affinity matured to increase the binding affinity of the peptide to the target protein or epitope thereof.

[0196] Binding affinity (or binding specificity) can be determined by a variety of methods including equilibrium dialysis, equilibrium binding, gel filtration, ELISA, surface plasmon resonance, or spectroscopy (e.g., using a fluorescence assay). Non-limiting exemplary conditions for evaluating binding affinity are in HBS-P buffer (10 mM HEPES pH7.4, 150 mM NaCl, 0.005% (v/v) Surfactant P20). These techniques can be used to measure the concentration of bound binding protein as a function of target protein concentration. The concentration of bound binding protein ([Bound]) is generally related to the concentration of free target protein ([Free]) by the following equation:

[Bound]=[Free]/(Kd+[Free])

[0197] It is not always necessary to make an exact determination of K_{A}, though, since sometimes it is sufficient to obtain a quantitative measurement of affinity, e.g., determined using a method such as ELISA, FACS analysis or magnetic immunoprecipitation, which is proportional to K_{A}, and thus can be used for comparisons, such as determining whether a higher affinity is, e.g., 2-fold higher, to obtain a qualitative measurement of affinity, or to obtain an inference of affinity, e.g., by activity in a functional assay, e.g., an in vitro or in vivo assay.

[0198] In some embodiments, a peptide disclosed herein or identified through the methods disclosed herein decreases the binding affinity of a target peptide with a naturally occurring cognate binding partner. In some embodiments, a peptide disclosed herein or identified through the methods disclosed herein decreases the binding affinity of a target peptide with a naturally occurring cognate binding partner by at least 10%, at least 20%, at least 30%, at least 40%, at least 50%, at least 60%, at least 70%, at least 80%, at least 90%, at least 95%, or at least 99%.

### Host Cells

[0199] Aspects of the present disclosure provide host cells comprising any of the nucleic acids, fusion proteins, peptides, enzymes, selection markers and components of the split intein-based systems disclosed herein. In some embodiments, a host cell is a eukaryotic cell. In some embodiments, a host cell is a prokaryotic cell. In some embodiments, a host cell is a bacterial cell. In some embodiments, a host cell is an E. coli cell. As one of ordinary skill in the art would appreciate, components of the split intein-based systems disclosed herein may be selected based on the type of host cell used.

[0200] A nucleic acid may encode any of the fusion proteins, peptides, enzymes, selection markers and components of the split intein-based systems disclosed herein. As used herein, a heterologous nucleic acid is one that is introduced into a host cell. A nucleic acid, generally, is at least two nucleotides covalently linked together, and in some instances, may contain phosphodiester bonds (e.g., a phosphodiester “backbone”). A nucleic acid is considered “engineered” if it does not occur in nature. Examples of engineered nucleic acids include recombinant nucleic acids and synthetic nucleic acids.

[0201] Nucleic acids encoding any of the fusion proteins, peptides, enzymes, selection markers and components of the split intein-based system described herein may be introduced into a host cell using any known methods, including but not limited to chemical transfection, viral transduction and electroporation. In some embodiments, one or more nucleic acids that are introduced into a host cell integrate into the host cell genome; in some embodiments, one or more nucleic acids that are introduced in a host cell do not integrate into the host cell genome. The nucleic acids described herein may encode one or more of the fusion proteins, peptides, enzymes, selection markers and components of the split intein-based system disclosed herein. In some embodiments, a nucleic acid comprises a sequence that is at least 60%, at least 70%, at least 80%, at least 90%, at least 91%, at least 92%, at least 93%, at least 94%, at least 95%, at least 96%, at least 97%, at least 98%, or at least 99% identical to SEQ ID NOs: 47-66 or 73-79, a nucleic acid sequence in Table 3, or a nucleic acid sequence disclosed herein. In some embodiments, a nucleic acid comprises a nucleotide sequence of any one of SEQ ID NOs: 47-66 or 73-79, a nucleic acid sequence in Table 3, or a nucleic acid sequence disclosed herein. Any of the plasmids disclosed herein may be used.

[0202] It should be understood the methods of identifying peptides disclosed herein may or may not use host cells. In some embodiments, a split intein-based system disclosed herein is not used in a host cell. For example, in vitro methods comprising incubating a split intein-based system disclosed herein in a reaction vessel under suitable conditions is encompassed by the present disclosure.

### Kits

[0203] Any of the host cells, nucleic acids, fusion proteins, peptides, enzymes, selection markers and components of the split intein-based systems disclosed herein, in some embodiments, may be assembled into pharmaceutical or diagnostic or research kits to facilitate their use in therapeutic, diagnostic or research applications. A kit may include one or more containers housing the components of the disclosure and instructions for use. Specifically, such kits may include one or more agents described herein, along with instructions describing the intended application and the proper use of these agents. In certain embodiments, agents in a kit may be in a pharmaceutical formulation and dosage suitable for a particular application and for a method of administration of the agents. Kits for research purposes may contain the components in appropriate concentrations or quantities for running various experiments.

[0204] In some embodiments, the instant disclosure relates to a kit for identifying a peptide that binds a target protein, the kit comprising a container housing any of the host cells, nucleic acids, fusion proteins, peptides, enzymes, and components of the split intein-based systems disclosed herein. In some embodiments, the kit further comprises instructions for identifying the peptide and/or performing the split intein-based selection.

[0205] In some embodiments, the instant disclosure relates to a kit comprising a container housing any of the nucleic acids disclosed herein. In some embodiments, the kit comprises a container housing a nucleic acid that comprises a sequence that is at least 60%, at least 70%, at least 80%, at least 90%, at least 91%, at least 92%, at least 93%, at least 94%, at least 95%, at least 96%, at least 97%, at least 98%, or at least 99% identical to SEQ ID NOs: 47-66 or 73-79, a nucleic acid sequence in Table 3, or a nucleic acid sequence disclosed herein; or that comprises the nucleotide sequence of any one of SEQ ID NOs: 47-66 or 73-79, a nucleic acid sequence in Table 3, or a nucleic acid sequence disclosed herein. In some embodiments, the instant disclosure relates to a kit comprising a container housing any of the peptides disclosed herein. In some embodiments, the kit comprises a container housing a peptide that comprises a sequence that is at least 60%, at least 70%, at least 80%, at least 90%, at least 91%, at least 92%, at least 93%, at least 94%, at least 95%, at least 96%, at least 97%, at least 98%, or at least 99% identical to SEQ ID NOs: 6-25 or 26-45, an amino acid sequence in Table 3 or any amino acid sequence disclosed herein, including fragments thereof; or that comprises the amino acid sequence of any one of SEQ ID NOs: 6-25 or 26-45, an amino acid sequence in Table 3 or any amino acid sequence disclosed herein, including fragments thereof. In addition, kits of the disclosure may include instructions, a negative and/or positive control, containers, diluents and buffers for the sample, sample preparation tubes and a printed or electronic table of reference peptide sequences for sequence comparisons.

[0206] The kit may be designed to facilitate use of the methods described herein by researchers and can take many forms. Each of the compositions of the kit, where applicable, may be provided in liquid form (e.g., in solution), or in solid form, (e.g., a dry powder). In certain cases, some of the compositions may be constitutable (e.g., reconstitutable) or otherwise processable (e.g., to an active form), for example, by the addition of a suitable solvent or other species (for example, water or a cell culture medium), which may or may not be provided with the kit. As used herein, “instructions” can define a component of instruction and/or promotion, and typically involve written instructions on or associated with packaging of the disclosure. Instructions also can include any oral or electronic instructions provided in any manner such that a user will clearly recognize that the instructions are to be associated with the kit, for example, audiovisual (e.g., videotape, DVD, etc.), Internet, and/or web-based communications, etc. The written instructions may be in a form prescribed by a governmental agency regulating the manufacture, use or sale of pharmaceuticals or biological products, which instructions can also reflect approval by the agency of manufacture, use or sale for animal administration. The kit may contain any one or more of the components described herein in one or more containers. As an example, in one embodiment, the kit may include instructions for mixing one or more components of the kit and/or isolating and mixing a sample and applying to a subject. The kit may include a container housing agents described herein. The agents may be in the form of a liquid, gel or solid (powder). The agents may be prepared sterilely, packaged in syringe and shipped refrigerated. Alternatively, it may be housed in a vial or other container for storage. A second container may have other agents prepared sterilely. Alternatively, the kit may include the active agents premixed and shipped in a syringe, vial, tube, or other container. The kit may have one or more or all of the components required to administer the agents to an animal, such as a syringe, topical application devices, or IV needle tubing and bag, particularly in the case of the kits for producing specific somatic animal models.

[0207] The kit may have a variety of forms, such as a blister pouch, a shrink-wrapped pouch, a vacuum sealable pouch, a sealable thermoformed tray, or a similar pouch or tray form, with the accessories loosely packed within the pouch, one or more tubes, containers, a box or a bag. The kit may be sterilized after the accessories are added, thereby allowing the individual accessories in the container to be otherwise unwrapped. The kits can be sterilized using any appropriate sterilization techniques, such as radiation sterilization, heat sterilization, or other sterilization methods known in the art. The kit may also include other components, depending on the specific application, for example, containers, cell media, salts, buffers, reagents, syringes, needles, a fabric, such as gauze, for applying or removing a disinfecting agent, disposable gloves, a support for the agents prior to administration etc.

### Pharmaceutical Compositions and Uses Thereof

[0208] Any of the peptides (e.g., modified peptides) disclosed herein or identified by a method disclosed herein may be formulated in a pharmaceutical composition for administration to a subject. As used herein, a subject is a human, non-human primate, cow, horse, pig, sheep, goat, dog, cat, or rodent. In all embodiments, human subjects are preferred.

[0209] In some embodiments, the subject is a suspected of having a disease or has previously been diagnosed as having a disease. In some embodiments, the subject is a human suspected of having a disease, or a human having been previously diagnosed as having a disease. Methods for identifying subjects suspected of having a disease may include physical examination, subject's family medical history, subject's medical history, biopsy, viral tests (e.g., nasal swabs), antibody tests (e.g., serological testing), or a number of imaging technologies such as ultrasonography, X-ray imaging, computed tomography, magnetic resonance imaging, magnetic resonance spectroscopy, or positron emission tomography.

[0210] In some embodiments, the subject is suspected of having or has previously been diagnosed as having an infectious disease (e.g., a disease caused by a pathogen and/or virus). As a non-limiting example, the subject may have coronavirus disease 2019 (COVID-19), which is an infectious disease. COVID-19 is caused by severe acute respiratory syndrome coronavirus 2 (SARS-CoV-2). SARS-CoV-2 may be diagnosed using any suitable method including nasopharyngeal swabs and serology testing for antibodies against coronavirus.

[0211] In some embodiments, the subject is suspected of having or has previously been diagnosed as having cancer. The term “cancer” refers to a class of diseases characterized by the development of abnormal cells that proliferate uncontrollably and have the ability to infiltrate and destroy normal body tissues. See, e.g., Stedman's Medical Dictionary, 25th ed.; Hensyl ed.; Williams & Wilkins: Philadelphia, 1990. Exemplary cancers include, but are not limited to, acoustic neuroma; adenocarcinoma; adrenal gland cancer; anal cancer; angiosarcoma (e.g., lymphangiosarcoma, lymphangioendotheliosarcoma, hemangiosarcoma); appendix cancer; benign monoclonal gammopathy; biliary cancer (e.g., cholangiocarcinoma); bladder cancer; breast cancer (e.g., adenocarcinoma of the breast, papillary carcinoma of the breast, mammary cancer, medullary carcinoma of the breast); brain cancer (e.g., meningioma, glioblastomas, glioma (e.g., astrocytoma, oligodendroglioma), medulloblastoma); bronchus cancer; carcinoid tumor; cervical cancer (e.g., cervical adenocarcinoma); choriocarcinoma; chordoma; craniopharyngioma; colorectal cancer (e.g., colon cancer, rectal cancer, colorectal adenocarcinoma); connective tissue cancer; epithelial carcinoma; ependymoma; endotheliosarcoma (e.g., Kaposi's sarcoma, multiple idiopathic hemorrhagic sarcoma); endometrial cancer (e.g., uterine cancer, uterine sarcoma); esophageal cancer (e.g., adenocarcinoma of the esophagus, Barrett's adenocarcinoma); Ewing's sarcoma; ocular cancer (e.g., intraocular melanoma, retinoblastoma); familiar hypereosinophilia; gall bladder cancer; gastric cancer (e.g., stomach adenocarcinoma); gastrointestinal stromal tumor (GIST); germ cell cancer; head and neck cancer (e.g., head and neck squamous cell carcinoma, oral cancer (e.g., oral squamous cell carcinoma), throat cancer (e.g., laryngeal cancer, pharyngeal cancer, nasopharyngeal cancer, oropharyngeal cancer)); hematopoietic cancers (e.g., leukemia such as acute lymphocytic leukemia (ALL) (e.g., B-cell ALL, T-cell ALL), acute myelocytic leukemia (AML) (e.g., B-cell AML, T-cell AML), chronic myelocytic leukemia (CML) (e.g., B-cell CML, T-cell CML), and chronic lymphocytic leukemia (CLL) (e.g., B-cell CLL, T-cell CLL)); lymphoma such as Hodgkin lymphoma (HL) (e.g., B-cell HL, T-cell HL) and non-Hodgkin lymphoma (NHL) (e.g., B-cell NHL such as diffuse large cell lymphoma (DLCL) (e.g., diffuse large B-cell lymphoma), follicular lymphoma, chronic lymphocytic leukemia/small lymphocytic lymphoma (CLL/SLL), mantle cell lymphoma (MCL), marginal zone B-cell lymphomas (e.g., mucosa-associated lymphoid tissue (MALT) lymphomas, nodal marginal zone B-cell lymphoma, splenic marginal zone B-cell lymphoma), primary mediastinal B-cell lymphoma, Burkitt lymphoma, lymphoplasmacytic lymphoma (i.e., Waldenstram's macroglobulinemia), hairy cell leukemia (HCL), immunoblastic large cell lymphoma, precursor B-lymphoblastic lymphoma and primary central nervous system (CNS) lymphoma; and T-cell NHL such as precursor T-lymphoblastic lymphoma/leukemia, peripheral T-cell lymphoma (PTCL) (e.g., cutaneous T-cell lymphoma (CTCL) (e.g., mycosis fungoides, Sezary syndrome), angioimmunoblastic T-cell lymphoma, extranodal natural killer T-cell lymphoma, enteropathy type T-cell lymphoma, subcutaneous panniculitis-like T-cell lymphoma, and anaplastic large cell lymphoma); a mixture of one or more leukemia/lymphoma as described above; and multiple myeloma (MM)), heavy chain disease (e.g., alpha chain disease, gamma chain disease, mu chain disease); hemangioblastoma; hypopharynx cancer; inflammatory myofibroblastic tumors; immunocytic amyloidosis; kidney cancer (e.g., nephroblastoma a.k.a. Wilms' tumor, renal cell carcinoma); liver cancer (e.g., hepatocellular cancer (HCC), malignant hepatoma); lung cancer (e.g., bronchogenic carcinoma, small cell lung cancer (SCLC), non-small cell lung cancer (NSCLC), adenocarcinoma of the lung); leiomyosarcoma (LMS); mastocytosis (e.g., systemic mastocytosis); muscle cancer; myelodysplastic syndrome (MDS); mesothelioma; myeloproliferative disorder (MPD) (e.g., polycythemia vera (PV), essential thrombocytosis (ET), agnogenic myeloid metaplasia (AMM) a.k.a. myelofibrosis (MF), chronic idiopathic myelofibrosis, chronic myelocytic leukemia (CML), chronic neutrophilic leukemia (CNL), hypereosinophilic syndrome (HES)); neuroblastoma; neurofibroma (e.g., neurofibromatosis (NF) type 1 or type 2, schwannomatosis); neuroendocrine cancer (e.g., gastroenteropancreatic neuroendoctrine tumor (GEP-NET), carcinoid tumor); osteosarcoma (e.g., bone cancer); ovarian cancer (e.g., cystadenocarcinoma, ovarian embryonal carcinoma, ovarian adenocarcinoma); papillary adenocarcinoma; pancreatic cancer (e.g., pancreatic andenocarcinoma, intraductal papillary mucinous neoplasm (IPMN), Islet cell tumors); penile cancer (e.g., Paget's disease of the penis and scrotum); pinealoma; primitive neuroectodermal tumor (PNT); plasma cell neoplasia; paraneoplastic syndromes; intraepithelial neoplasms; prostate cancer (e.g., prostate adenocarcinoma); rectal cancer; rhabdomyosarcoma; salivary gland cancer; skin cancer (e.g., squamous cell carcinoma (SCC), keratoacanthoma (KA), melanoma, basal cell carcinoma (BCC)); small bowel cancer (e.g., appendix cancer); soft tissue sarcoma (e.g., malignant fibrous histiocytoma (MFH), liposarcoma, malignant peripheral nerve sheath tumor (MPNST), chondrosarcoma, fibrosarcoma, myxosarcoma); sebaceous gland carcinoma; small intestine cancer; sweat gland carcinoma; synovioma; testicular cancer (e.g., seminoma, testicular embryonal carcinoma); thyroid cancer (e.g., papillary carcinoma of the thyroid, papillary thyroid carcinoma (PTC), medullary thyroid cancer); urethral cancer; vaginal cancer; and vulvar cancer (e.g., Paget's disease of the vulva).

[0212] In some embodiments, the subject is suspected of having or has previously been diagnosed as having a bacterial infection (e.g., an infection caused by a pathogenic bacterium). Exemplary bacterial infections include, but are not limited to, pulmonary infections (e.g., upper respiratory infection or lower respiratory infections), urinary tract infections, skin infections (e.g., bacterial cellulitis), sexually transmitted infections, neurological infections (e.g., bacterial encephalitis, bacterial meningitis), cardiac infections (e.g., bacterial endocarditis, bacterial myocarditis, or bacterial pericarditis), gastrointestinal infections (e.g., gastric infections, bacterial gastroenteritis, bacterial pharyngitis), bacterial vaginosis, and Lyme disease. Bacterial infections can be caused by any bacterium, including, but not limited to, Gram-positive bacteria, Gram-negative bacteria, Streptococcus pneumoniae, Haemophilus species, Staphylococcus aureus, Mycobacterium tuberculosis, methicillin-resistant S. aureus, non-typhoidal Salmonella species, Salmonella typhi, Bacillus cereus, Clostridium perfringens, Clostridium botulinum, Escherichia coli (ETEC, EPEC, EHEC, EAEC, EIEC), Salmonella sp., Shigella sp., Campylobacter sp., Yersinia enterocolitica, Clostridium difficile, Vibrio cholerae, Vibrio parahemolyticus, Listeria monocytogenes, Aeromonas hydrophila, Plesiomonas sp., Neisseria meningitidis, Streptococcus pneumoniae, Haemophilus influenzae, Neisseria gonorrhoeae, Chlamydia trachomatis, Treponema pallidum, Borrelia burgdorferi, Vibrio cholerae, Clostridium tetani, and Bacillus anthracis.

[0213] A “plurality” of elements, as used throughout the application refers to two or more of the elements.

[0214] The peptides (e.g., modified peptides) of the invention are administered to the subject in an effective amount for detecting or modulating protein (e.g., enzyme) activity. An “effective amount”, for instance, is an amount required to confer therapeutic effect on a subject, either alone or in combination with at least one other active agent. The effective amount of a peptide of the invention described herein may vary depending upon the specific peptide used, the mode of delivery of the peptide, and whether it is used alone or in combination. The effective amount for any particular application can also vary depending on such factors as the disease being assessed or treated, the particular peptide being administered, the size of the subject, or the severity of the disease or condition as well as the detection method. One of ordinary skill in the art can empirically determine the effective amount of a particular molecule of the invention without necessitating undue experimentation. Combined with the teachings provided herein, by choosing among the various active peptides and weighing factors such as potency, relative bioavailability, patient body weight, severity of adverse side-effects and preferred mode of administration, an effective regimen can be planned.

[0215] Pharmaceutical compositions of the present invention comprise an effective amount of one or more agents, dissolved or dispersed in a pharmaceutically acceptable carrier. The phrases “pharmaceutical or pharmacologically acceptable” refers to molecular entities and compositions that do not produce an adverse, allergic or other untoward reaction when administered to an animal, such as, for example, a human, as appropriate. Moreover, for animal (e.g., human) administration, it will be understood that preparations should meet sterility, pyrogenicity, general safety and purity standards as required by FDA Office of Biological Standards.

[0216] As used herein, “pharmaceutically acceptable carrier” includes any and all solvents, dispersion media, coatings, surfactants, antioxidants, preservatives (e.g., antibacterial agents, antifungal agents), isotonic agents, absorption delaying agents, salts, preservatives, drugs, drug stabilizers, gels, binders, excipients, disintegration agents, lubricants, sweetening agents, flavoring agents, dyes, such like materials and combinations thereof, as would be known to one of ordinary skill in the art (see, for example, Remington's Pharmaceutical Sciences (1990), incorporated herein by reference). Except insofar as any conventional carrier is incompatible with the active ingredient, its use in the therapeutic or pharmaceutical compositions is contemplated. The agent may comprise different types of carriers depending on whether it is to be administered in solid, liquid or aerosol form, and whether it need to be sterile for such routes of administration as injection.

[0217] General considerations in the formulation and/or manufacture of pharmaceutical agents, such as compositions comprising any of the engineered cells disclosed herein, may be found, for example, in Remington: The Science and Practice of Pharmacy 21st ed., Lippincott Williams & Wilkins, 2005 (incorporated herein by reference in its entirety).

[0218] Suitable routes of administration include, for example, parenteral routes such as intravenous, intrathecal, parenchymal, or intraventricular injection.

### EXAMPLES

### Example 1: Plasmid Design for Split Intein-Based RiPP Selections

[0219] A three plasmid system was used to conduct selection experiments. All plasmids are low-medium copy number variants previously characterized¹: the “peptide plasmid” is a pSC101 backbone with an ampicillin resistance cassette (working concentration of 100 ng/uL) and contains a Type IIs restriction site for insertion of RiPP/peptide sequences N-terminal to one half of the split intein/sigma factor under control of an inducible T5 lacO promoter (maximally induced with 1 mM IPTG). The “modifying enzyme plasmid” is a p15A backbone with a spectinomycin resistance cassette (working concentration of 50 ng/uL) and contains a Type IIs restriction site for inserting cognate RiPP modifying enzymes under control of an inducible pCym promoter (maximally induced with 100 uM cumate). The “selection plasmid” is a ColE1 backbone with a kanamycin resistance cassette (working concentration of 50 ng/uL) and contains two regions of expression. The first is a C-terminal fusion of the SARS-CoV-2 receptor binding domain (RBD) of the Spike protein² to the other half of the split intein-sigma factor. The second expression region contains two open reading frames downstream of the ECF20_992 promoter. The first is a sfGFP-cat gene for expression of superfolder-green fluorescent protein (sfGFP) and a chloramphenicol acetyltransferase (CAT) and the second is hsvTK-mScarlet-I gene for expression of the red fluorescent protein mScarlet-I and, when in the presence of a nucleoside analog, the toxic gene product, herpes simplex virus thymidine kinase (HsvTK) 3 (FIG. 2A).

[0220] The three plasmid system allows for flexible selection methods. Inducible expression of the peptide and modifying enzyme plasmids results in production of modified RiPP libraries with C-terminal fusions to the split intein machinery. RiPPs that are able to bind to the target (in this case, the RBD) lead to productive intein association and splicing 4 of the split sigma factor, which induces expression of the selection cassettes. For positive selection of binders, increasing concentrations of chloramphenicol (cm) can be used to enrich for target binders (in this case, an RBD-intein fusion) that produce increasing amounts of CAT (FIG. 2B, FIG. 2D, and FIG. 2F). For negative selection of binders, increasing concentrations of nucleotide 6-(β-D-2-deoxyribofuranosyl)-3,4-dihydro8H-pyrimido [4,5-c][1,2] oxazin-7-one (dP) can be used to deplete target binders (in this case, a Mdm2-intein fusion; note any off-target protein fusion is suitable) that produce increasing amounts of HsvTK (FIG. 2C, FIG. 2E, and FIG. 2G).

[0221] For the generation of this initial round of RBD hits, a negative selection was not implemented. Current and future selections will utilize positive and negative selections in consecutive, discrete rounds to best evolve RiPP libraries toward high affinity and specific binders to the RBD.

### Example 2: Identification of RiPP Binders of RBD

### Design and Construction of RiPP Libraries and Cognate Modifying Enzymes

[0222] Five libraries were designed based on in-house understanding of RiPP biosynthetic constraints, (FIG. 3). Library 1 contains recognition sites (RS) for the enzymes ProcM and LynD, which install lanthionines and thiazolines, respectively. Library 2 contains RS for the enzymes TgnB and LynD, which install ester linkages and thiazolines, respectively. Libraries 3-5 contain the RS for the enzyme PapB, which installs thioethers. The predicted cyclization topologies and amino acid degeneracy are outlined for each library in FIG. 3.

[0223] Library sizes were as indicated in Table 2 based on serial dilutions and counting colony forming units (CFU)/mL.

TABLE 2
Library sizes

| library | core mod | size |
|---|---|---|
| 1 | procM | 6E+07 |
| 2 | tgnB | 1E+07 |
| 3 | papB | 1E+07 |
| 4 | papB | 1E+06 |
| 5 | papB | 1E+07 |

### Selection Methods for Generation of Pilot Hits

[0224] Appropriate antibiotics were used at every stage for plasmid propagation, as detailed above. Inducers were used at maximum concentration where indicated, as detailed above. Transformation efficiencies were recorded via serial dilution and CFU/mL counts. Libraries were miniprepped and transformed into separate electrocompetent strains of E. coli Marionette-Clo⁵ containing cognate modifying enzyme and selection constructs (transformation efficiencies >10⁸ CFU/mL). After a one-hour outgrowth, strains were diluted 1:50 for plasmid outgrowth and induction of library peptides and modifying enzymes. This culture was grown overnight at 30° C., with shaking at 250 RPM.

[0225] After overnight growth, libraries were diluted 1 mL in 100 mL TB medium in inducing conditions. Selections were grown at 30° C. for 20 hours, 250 RPM. 4 mL of each selection was miniprepped and modifying enzyme/selection plasmids were restriction digested using SacI/KpnI (NEB, per manufacturer's instructions). Resulting digests were column purified (Zymo) and re-transformed in strains containing modifying enzyme/selection plasmids. This step was done in order to eliminate escape mutants in the selection plasmid (for instance, mutations generating high-level, constitutive expression of cat-GFP; see FIGS. 5 and 7). FIG. 4 outlines the process graphically.

[0226] For this initial pilot screen, 3 rounds of positive selections were conducted, at 300, 800 and 1200 uM chloramphenicol. Cell populations were assessed via cytometry to observe shifts in REU values (FIGS. 5 and 7). Libraries 3 (FIGS. 5A, 5B, and 5C) and 5 (FIGS. 7A, 7B, and 7C) demonstrated ideal REU shifts over rounds of selection and were chosen for next-generation sequencing (NGS). Degenerate regions of the peptide library plasmid were amplified and submitted for Illumina sequencing (HiSeq) to generate quantitative reads of peptide populations. Peptide sequences that were enriched in iterative selection rounds and also comprised >1% of the final population are summarized in FIGS. 6A and 6B (Library 3) and FIGS. 8A and 8B (Library 5).

### Confirmation of Pilot Hits

[0227] 20 sequences were codon optimized, synthesized as gBlocks (IDT), and individually cloned into the peptide plasmid. These 20 peptide plasmids were co-transformed with the PapB modifying enzyme plasmid and either the RBD-intein or Mdm2-intein as target in the selection plasmid. After overnight induction of peptide/modifying enzyme at 30° C., cells were analyzed via cytometry and REU values determined (FIG. 9A). Fold specificity was determined by comparing the ratio of REU values of peptides either against RBD or Mdm2-intein fusions (FIG. 9B). One hit emerged as having high specificity for the RBD (FIG. 9C).

### REFERENCES FROM EXAMPLES 1 AND 2

[0228] 1 Segall-Shapiro, T. H., Sontag, E. D. & Voigt, C. A. Engineered promoters enable constant gene expression at any copy number in bacteria. Nat. Biotechnol., doi:10.1038/nbt.4111 (2018).
[0229] 2 Lan, J. et al. Structure of the SARS-CoV-2 spike receptor-binding domain bound to the ACE2 receptor. Nature 581, 215-220, doi:10.1038/s41586-020-2180-5 (2020).
[0230] 3 Kawai-Noma, S. et al. Improvement of the dP-nucleoside-mediated herpes simplex virus thymidine kinase negative-selection system by manipulating dP metabolism genes. J Biosci Bioeng, doi:10.1016/j.jbiosc.2020.03.002 (2020).
[0231] 4 Stevens, A. J. et al. Design of a Split Intein with Exceptional Protein Splicing Activity. J. Am. Chem. Soc. 138, 2162-2165, doi:10.1021/jacs.5b13528 (2016).
[0232] 5 Meyer, A. J., Segall-Shapiro, T. H., Glassey, E., Zhang, J. & Voigt, C. A. Escherichia coli “Marionette” strains with 12 highly optimized small-molecule sensors. Nat. Chem. Biol., doi:10.1038/s41589-018-0168-3 (2018).

### Example 3: De Novo Design of Enzyme-Modified Peptides

[0233] Chemically-modified peptides are made by all kingdoms of life, where the enzymatic decorating and reshaping are critical for function. Peptides could be designed de novo by harnessing the modifying enzymes from the deluge of genomics, but it is difficult to extract the rules guiding their use and combination. In this Example, a model that captures the minimal specificity constraints was developed to use enzymes gleaned from microbial gene clusters encoding RiPPs (ribosomally-synthesized and post-translationally modified peptides). They include the recognition site (RS) sequence and restrictions on its placement in the precursor peptide and the tolerance to variability of the released core. The rule sets were empirically parameterized using a pipeline to construct and evaluate the activities of enzymes against hundreds of precursor peptide variants in Escherichia coli. This was applied to nine enzymes from eight RiPPs classes, including those for which there is little prior characterization (lactone macrocyclase, tyramine excisionase, glutamate heterocyclase, cysteine heterocyclase, glycosyltransferase, serine kinases, decarboxylase, and methyl transferase). The rules can be algorithmically combined to computationally design new-to-nature RiPPs, demonstrated by creating a 13-mer that combines excision, heterocyclization, and phosphorylation (PlpXY, LynD, ThcoK). Formalizing enzyme rules provides a foundation for retrosynthesis, where peptides and libraries could be designed to facilitate therapeutic discovery and diversification.

### INTRODUCTION

[0234] Across biology, peptides are chemically modified for diverse purposes, from enhancing antimicrobial potency to honing signaling specificity and nucleating inorganic materials [1-6]. In the pursuit of pharmaceutical or other applications, one would like to design patterns of modifications in a peptide, but this is challenging using total synthesis because routes are long and involve highly-functionalized and chiral molecules [7-9]. An alternative would be to encode the peptide as a gene that is expressed with enzymes that introduce the desired post-translational modifications (PTMs) [10-12]. The process of identifying a path to a target molecule is a form of retrosynthesis that requires knowing the rules by which enzymes can be combined to act on a peptide sequence [13].

[0235] Peptide secondary metabolites are often encoded in genomes as a RiPP where a precursor peptide is expressed that comprises a leader and core sequence [3]. An enzyme binds to a recognition site (RS) in the leader and modifies amino acid(s) in the core [14-16]. PTMs include the introduction of cycles, added moieties (e.g, methylation), or conversions (e.g., epimerization) [3, 17-19]. A leader can have up to three RSs, sometimes overlapping to save space [20-22]. Changing the distance dbetween the RS and the modified amino acid(s) can affect the efficiency and which amino acids are modified [22-31]. Some enzymes are more sensitive than others, likely due to flexibility or allostery [32-34]. Leader-independent “tailoring” enzymes add modifications before or after the proteolytic release of the core [3]. To date, up to eight modifying enzymes have been found to act on a single peptide (theiostrepton), but the number of modifications can be much larger (e.g., polytheonamide has 49 modifications by 7 enzymes) [22, 35, 36].

[0236] During evolution, core hypervariability around a PTM scaffold facilitates the exploration of functional space, for example to diversify antimicrobials against new threats [10, 11, 37-40]. By physically separating binding from catalysis, leader-dependent enzymes are highly tolerant to changes to the core sequence; typically, 40-90% of mutants are modified correctly [12, 16, 17, 19, 20, 26, 27, 31, 41-50]. The specificity of tailoring enzymes can vary, with some being sensitive to sequence or the peptide conformation and others being very broad, notably when they modify the termini [46, 51-55]. Taken together, the minimal rule set needed to repurpose an enzyme is: 1. the tolerance of the core sequence, and 2. the RS sequence and position constraints within the leader, if relevant (FIG. 10A).

[0237] Various approaches have been used to discern these rules. Importantly, when characterizing an enzyme for retrosynthesis, the constraints must be with respect to the chemistry performed and not function [42]. For example, in one study, only 41% of thiopeptide mutations that yielded the correct PTM also retained antibiotic activity [56]. While bioinformatics can be used to deduce the RS or enumerate core variability, drawing them from natural genomes implies functionality [57, 58]. Another approach is to evaluate the impact of mutants with libraries created though alanine-scanning, saturation mutagenesis, or core shuffling [42, 47, 59-66]. Billions can be evaluated using assays that screen for function or by panning for target binding [26, 47, 56, 62, 64, 67-72]. The throughput of chemical assays is more limited; electrospray ionization mass spectroscopy (ESI-MS) can characterize hundreds of variants [29, 33, 42, 73]. MALDI-MS and SAMDI-MS could scale to 10⁴ variants or more, but they are currently limited by peptide length and require additional expensive processing steps when automated [31, 50, 56, 74, 75].

[0238] Early work has combined enzymes from different pathways to build novel compounds, but typically, these have been sourced from the same RiPPs family [39, 55, 76]. Some tailoring enzymes will modify nearly any core and this observation has been used to incorporate methyltransferases, decarboxylation or epimerases into unrelated pathways [46, 55, 77]. Combining enzymes across RiPP classes has proven more difficult. In pioneering work, Mitchell and van der Donk showed that leader-dependent enzymes from sactipeptide, lanthipeptide, and heterocycloanthracin pathways could be combined by creating leader chimeras combining the RSs [74]. Along with a tailoring enzyme, this was used to make a new 32-mer lanthipeptide containing a thiazoline and d-Alanine.

[0239] In this Example, enzyme specificity rules were formalized to facilitate their algorithmic combination to create a peptide with a defined PTM pattern. Four leader-dependent enzymes (TgnB, PlpXY, PaaP and LynD) and five tailoring enzymes (PalS, ThcoK, PadeK, EpiD, LasF) were selected to represent diverse chemical modifications, species, and RiPP classes (Table 5) [18, 54, 59, 78-81]. Most have little prior information in the literature regarding substrate preferences. Escherichia coli was selected as the chassis because RiPP enzymes often work in this host and the “Marionette” strains allow the independent control of up to a dozen genes [82-84]. An N-terminal SUMO RiPP stabilization tag (RST; as described in Example 8) was used to increase the concentration of precursor peptide and simplify leader cleavage, which can be difficult to predict [85]. Mutagenesis strategies were developed to efficiently extract the enzyme rules: recognition site, distance constraint, and core tolerance (FIG. 10A). An automation pipeline that spans oligo synthesis to ESI-MS analysis was used to evaluate over 1000 precursor peptide variants. The substrate rules were put into a form that simplifies their combination, to computationally design a precursor peptide that is modified by multiple enzymes. As a proof-of-principle, heterocyclized peptides that contain a thiazoline, beta-amino acid, and phosphorylated serine were designed and it was verified that 4/5 had the correct modifications, whereas there was an estimated 1 in 10 million chance of success if designed randomly. This Example lays out a strategy to mine RiPP enzymes with the data necessary to inform retrosynthesis algorithms to aid the design of desired post-translational patterns.

### Results

### Characterization of Leader-Dependent Enzymes

[0240] A microtiter-based peptide expression, purification, and analysis pipeline was adapted to study modification of many peptide mutants/variants by individual modifying enzymes. This is a two plasmid system, with modifying enzyme produced from a p15A medium-copy plasmid and precursor peptide expressed from a pSC101 origin mutated to maintain at medium copy number (var 2, [87], FIGS. 44A-44D). Modifying enzyme expression was controlled by the cumate-inducible CymR repressor with matching promoter due to the repressor's high expression and low leak, while precursor peptide expression was controlled by the IPTG-inducible lac repressor with the T5LacO promoter due to its high expression (leak was acceptable for precursor peptide expression) [84]. Peptide expression was stabilized with by the RST, which includes an N-terminal hexahistidine (HIS₆) tag for affinity purification, a SUMO stabilization tag, and a TEV cleavage site for liberation of the precursor peptide from SUMO (with residues “GC” remaining with the liberated peptide—G from the TEV cleavage site and C for compatibility with SAMDI analysis). Ribosome binding sites (RBS) were custom designed for each modifying enzyme using the RBS calculator to normalize expression levels, while a single RBS was used with the peptides since the RST sequence was consistently downstream and insulated the RBS from different precursor peptide sequences[88, 89]. A ribozyme was also used for modifying enzyme expression to stabilize mRNA and minimize effects of different promotors on translation (required for multi-enzyme modification) [90].

TABLE 5
Enzymes investigated in Example 3.

| RiPP Class | Enzyme | Enzyme | Peptide | Organism | Ref |
|---|---|---|---|---|---|
| microviridin | lactone cyclase | TgnB | TgnA* | Bacillus thuringiensis | 58 |
| pantocin | glu-glu cyclase | PaaA | PaaP | Pantoea agglomerans | 59, 78, 136 |
| spliceotide | tyrosine excisionase | PlpXY | PlpA2 | Pleurocapsa sp. | 18 |
| cyanobactin | thiazoline cyclase | LynD | TruE* | Prochloron spp. | 39 |
| lasso peptide | carboxylic acid methyl- | LasF | LasA | Lentzea kentuckyensis | 79, 113 |
| | transferase | | | | |
| glycocin | cysteine glycosyl-transferase | PalS | PalA | Aeribacillus pallidus | 110 |
| lanthipeptide | de-carboxylase | EpiD | EpiA | Staphylococcus epidermidis | 54, 106 |
| lasso peptide | serine kinase | ThcoK | ThcoA | Thermobacillus composti | 80, 81 |
| lasso peptide | serine kinase | PadeK | PadeA | Paenibacillus dendritiformis | 80, 81 |

*in this Example, truncated forms of the wild-type TgnA and TruE peptides were used, which only included one core sequence (see Table 8).

[0241] Nine RiPP modifying enzymes were selected for analysis in this Example (Table 5; see also Table 7). Four of the selected enzymes were leader dependent and needed recognition sites and spacing constraints elucidated. Three of those (PlpXY, LynD, and PaaA) contained the RiPP recognition element (RRE) domain previously shown to be responsible for leader binding [14, 15], while TgnB is an ATP-Grasp microviridin-class enzyme with a less-studied binding mechanism. These four enzymes are from different bacteria genera, catalyze diverse chemical modifications, and result in different physicochemical properties in the modified peptide:

[0242] (1) TgnB, from Bacillus thuringiensis, covalently links glutamate/aspartate residues with serine/threonine residues to form the bi-cyclic depsipeptide thuringeinin[58]. The resulting cyclic peptide is a potent antidigestive (digestive protease inhibitor) and is rigid and constrained, both properties of interest in the peptide drug-discovery community [6]. The enzyme was codon optimized and synthesized, and used to modify a truncated peptide substrate with only one core (versus the three-core repeat in the native TgnA peptide)[58].

[0243] (2) PlpXY, from Pleurocapsa sp. PCC 7319, excises tyramine (the amine, alpha carbon, and sidechain of tyrosine) by breaking the peptide backbone and re-fusing it, resulting in a ketone containing beta-amino acid [18]. The modification is interesting both in its chemical reactivity (it can be used as a click substrate), and its uniqueness—no other RiPP enzyme known alters the peptide backbone as extensively. The enzyme PlpX and its RiPP recognition element PlpY were both codon-optimized and expressed as a two-gene operon and used to modify PlpA2, one of three core peptides in the cluster.

[0244] (3) PaaA, an antibiotic from Pantoea agglomerans, performs a Claisen condensation between two adjacent glutamate residues, resulting in the fused-ring heterocycle indolizidine [78]. This alkaloid moiety is not typically associated with RiPP biosynthesis, but is prevalent in many bioactive small molecules [91]. The enzyme was codon optimized and was used to modify its native precursor peptide (also codon optimized).

[0245] (4) LynD, from Lyngbya sp., dehydrates a cysteine with a peptide backbone amide to form a five-membered heterocycle. The resulting heterocycle, thiazoline, spans what was the amide bond, creating a protease resistant backbone[92]. Thiazolines retain the planar structure of the amide [92] and can be oxidized to aromatic thiazoles by cyclodehydratases found in some RiPP clusters[93]. Due to their valuable properties, thiazol(in)e heterocycles are frequently found in bioactive natural products and approved drugs[92]. LynD was codon optimized, and was used to modify a single-core truncation of TruE, a precursor peptide from a homologous pathway.

[0246] To generate the peptide expression plasmids, and leader mutants thereof, some were ordered as oligos, PCR amplified, and cloned into TypeIIs expression vectors, but a majority were synthesized and assembled by Twist Biosciences. From Twist, peptide vectors were rehydrated and immediately co-transformed with their cognate modifying enzyme plasmid in microtiter 96-well plates. Because only clonal, sequence verified plasmids were used, co-transformants were directly selected for by growing in LB supplemented with kanamycin and carbenicillin, without plating on agar and picking colonies. After overnight incubation, stationary phase cultures were diluted 1:100 into expression media and maximally-induced at approximately mid-log to decrease potential toxicity effects on growth[94]. A high-velocity microtiter plate shaker was required due to the use of deep 96-well plates. It was found that shaking below 900 r.p.m. led to cell sedimentation and highly variable expression. The peptide/enzyme expressions were conducted in TB media, such that conditions for all enzymes were identical.

[0247] Liquid-chromatography coupled to mass spectrometry (LC-MS) was used for peptide analysis. SUMO-tagged peptides were analyzed directly (without tag removal) in order to decrease the number of processing steps and reduce peptide-to-peptide run variability (the tag buffers against the chromatographic properties and solubility of diverse peptides). Peptides purified and eluted via IMAC were directly injected on the LC-MS for analysis. Since all of the modifications studied in this Example resulted in a change in mass between the unmodified and modified peptide, extracted compound chromatograms could be generated based on the expected masses of the unmodified, partially modified (if relevant), and modified peptides. If a chromatogram contained a peak, it was fit with a skewed gaussian[96], and the resulting fit was used to calculate peak area. Peak areas for modified, partially modified (if applicable), and unmodified peptide were summed to calculate the total peptide observed, which was then used to calculate the fraction of each peptide modification state.

[0248] While this process was chosen due to its simplicity and scalability, it does have two limitations: 1) Modified, partially modified, and unmodified peptide masses were sometimes not fully resolved in the MS. For the tagged large peptides analyzed (15-25 kDa), the isotope distribution could span 15-25 Da. If the modification being studied caused a mass shift of <15-25 Da, the isotope distributions between the unmodified and modified peptides would not be fully resolved, leading to crossover during integration of the modified and unmodified peptides. Similarly, spurious sodium adducts could cause a 22 Da mass shift, resulting in overlap with enzyme-catalyzed 14 Da (LasF) and 18 Da (TgnB and LynD) mass shifts, also affecting integrations and fraction modified calculations. 2) Multiple charge states are required to reliably annotate a peptide as present, which raises the limit of detection. On the machine that was used, the SUMO-tagged peptide limit of detection was estimated to be a peak area of ˜10⁴⁻⁵. The median peak size observed was ˜10⁶, meaning that a peptide with a fraction modified of 0.0 could actually have been as high as 0.1, if the modified peptide intensity was just below the detection threshold, or fraction modified of 1.0 could have been as low as 0.9 (though this would have had no effect on intermediate values of fraction modified). Most of the overlapping isotope effects were solved by extracting ECCs using a small m/z window around the expected mass of each peptide, such that regions of isotope overlap were ignored. For any remaining effects of overlapped isotope distribution, as well as sodium adduct and high limit of detection effects, the effects should largely have been dependent on the modification mass shift and the peptide being studied. Therefore, the effects could be countered by only comparing fraction modified within the same modification, since the effects should be similar (and cancel out) for similar peptides with the same modification.

[0249] Using the outlined pipeline, the four leader-dependent modifying enzymes were used to assay for modification (FIG. 46). Fraction of peptide modified varied between the enzymes (0.32-0.94), qualitatively in agreement with data presented in previous publications[18, 39, 58, 78]. PaaA and LynD were the most efficient, with 94% and 83% of their peptide modified, respectively. TgnB was distributive[58], like other microviridins[97], meaning that the enzyme binds, forms a single lactone, unbinds, and the process repeats until all lactones are formed. Both lactones were formed in 65% of the peptide, with the remaining 35% evenly split between unmodified and a single lactone modification. The lowest fraction modified was observed for PlpXY, with 32% of PlpA2 modified, although this was similar to the low-turnover shown previously [18]. Encouragingly, the platform gave reproducible values, with standard deviations as low as 2% (LynD and TgnB) and not above 3.8% (PlpXY).

Identification of Recognition Sites within Leaders

[0250] A simple approach was taken to deduce each enzyme's RS sequence(s). Alanine scanning is effective in finding the RSs, by measuring when the modification to the core is disrupted [60]. However, making a single substitution at every position is inefficient, particularly for long leaders and provides unnecessary resolution given that the smallest RS known is 7 amino acids[98] (excluding protease sites). Instead, blocks of 4-5 alanines were used to scan the leader and measure the impact on the fraction modified (block size dependent on leader length). The block was iteratively moved by 2-3 residues for each mutant (FIG. 10B). As an example, only 14 mutants of the 42-residue TgnA leader needed to be made to identify the RS for TgnB (FIG. 10C). When the alanine block disrupts the RS, the efficiency of modification drops dramatically, in this case at the far N-terminus of the leader. The results of these experiments for the leader-dependent enzymes are shown FIGS. 47A-47D, 48A-48D, 49A-49C, and 50A-50D.

[0251] A thermodynamic model was derived to infer the per-residue contribution to the binding of the modifying enzyme. This was simplified by assuming that the reaction follows Michaelis-Menten kinetics, where reversible binding to the leader precedes modification and release. This treats the binding and unbinding as being at quasi-steady state with respect to the production and degradation of the peptide; in other words, the ratio modified ρ, is the equilibrium value. Then, the change in the free energy of binding of the variant n with respect to the wild-type is

$$ΔΔ {G}_{n} = Δ {G}_{n} - Δ {G}_{wt} = - RT ln ( \frac{{ρ}_{π}}{{ρ}_{wt}} ) \qquad ( Equation 1 )$$

where R is the gas constant and T is temperature. If the contribution of each residue i of a mutant contributes additively to the free energy change, then

ΔΔGₙ=Σᵢ₌₁^{M}ΔΔGᵢ (Equation 2)

where M is the number of mutated residues. An algorithm was developed to assign ΔΔGᵢ values using all of the variant data. Initially, the contribution of ΔΔGₙ was divided equally amongst the mutated residues (for example, divided by 5 for a 5-alanine block in which none of the wild-type residues replaced by the block were originally alanines). However, some residues were mutated in two variants, so the residue was assigned a ΔΔGᵢ value of the mean of the two ΔΔGₙ/M values. The resulting ΔΔGᵢ assignments violated equation 2 (ΔΔGᵢ values will not sum to ΔΔGₙ within a variant), so ΔΔGᵢ values were adjusted iteratively and in small increments (similar to a force-directed graph) until the constraint of equation 2 was satisfied for all variants.

[0252] The result of this calculation is shown in FIG. 10C for TgnA/TgnB. Eleven residues at the N-terminal end were determined to have high ΔΔGᵢ values. This was in agreement with previously published observations that deletion of residues −42 through −35 or −34 through −29 residues at the N-terminus of the TgnA leader peptide knocks out TgnB modification while deletions in other sections of the leader are tolerated [58], as well as high conservation of residues −40 through −33 in TgnA homologs (FIG. 56). These data were mapped to the leader sequence in FIG. 10D, shaded according to the magnitude of ΔΔGᵢ. Because ΔΔGᵢ values were based on alanine-block replacements, they may not accurately depict the edge of an RS. The RS defined for the specificity rule is outlined by a box in FIG. 10D. For several enzymes, it did not exactly correspond to the regions of high ΔΔGᵢ because additional information was incorporated into the designation; either expanding it to be conservative or shrinking it if there was information that the residues were not important.

[0253] One source of additional information was leader structure. A Deep Convolutional Neural Field algorithm (RaptorX Structure Property Prediction) was used to predict the secondary structure of the leaders (FIG. 10D) [99]. Of the four peptides, TgnA was the only leader RS that did not align with an alpha-helical region, which was surprising given that the TgnB homolog MdnC recognizes an alpha-helix in the MdnA leader[98]. The sequence itself is also similar, with TgnB recognizing “YRPYIAKYVEE (SEQ ID NO: 108)”, with bolded residues aligning closely with the “PFFARFL (SEQ ID NO: 109)” recognition site highly conserved in microviridin leader peptides[98]. Analysis of the MdnA peptide with RaptorX predicted an alpha-helix at the RS, indicating that the TgnA sequence may elude secondary structure prediction by this algorithm or the TgnB enzyme does not bind a helix like MdnC. Closer investigation of the secondary structure prediction from RaptorX showed that the recognition site is ˜10 times more likely to have a helix than anywhere else in the leader peptide, but ˜3 times less likely than beta-sheet or coil at those positions. Importantly, this showed that secondary structure alone cannot reliably predict an RS. PlpXY, PaaA, and LynD all bind to the RS via a RiPP recognition element (RRE) which has been shown to bind to alpha-helical peptides [14]. Indeed, the high ΔΔGᵢ residues corresponded to regions predicted to adopt a helical structure. In the case of LynD, even though only three residues were calculated to have a high ΔΔGᵢ, the boundaries of the RS were extended to encompass more of the helix (FIG. 10D). In contrast, the final glycine was removed from the PlpXY recognition site in PlpA2 because it was not part of the helix, and the “GG” leader motif is commonly necessary for cleavage between the leader and core, not for modifying enzyme recognition [100].

[0254] Sequence conservation within peptide homologs was also incorporated. Encouragingly, for all of the leader peptides, regions of high ΔΔGᵢ values corresponded to regions of high conservation in weblogos of peptide homologs (FIG. 56). Similar to structural predictions, sequence homology was used to inform the boundaries of the recognition sites. The LynD recognition site did not include the full helix (“SQ” at the beginning is not included) because those positions had poor conservation in TruE homologs (FIG. 56). The resulting LynD recognition site, “LAELSEEAL (SEQ ID NO: 110)” is highly conserved in other cyanobactin peptides [39], and has been shown to be sufficient for modification with LynD homologs[76]. While the first two residues of the TgnB leader were kept in the recognition site, lower conservation at those positions may indicate that they are not necessary. Finally, the two positions N-terminal to the PlpA2 RS (“NE”) were not included because they are not conserved in PlpA2 homologs.

[0255] While the alanine scans showed that sequences in the RSs are necessary, and homologous sequences and structural predictions can help validate those data and inform boundaries, they did not prove that the RS is sufficient for modification. For each of the peptides, truncations were tested to remove sequence that should be unnecessary. The TgnA RS is at the N-terminus of the leader, so only truncations between the RS and the core were possible. The effect of truncations on RS-to-modification spacing versus sequence importance could not be differentiated, but truncations of various sizes were generally tolerated. Most truncations were modified over half as well as wild-type, and were modified as well as or better than similarly-sized insertions, indicating that the modifying enzyme is sensitive to changes in RS-modification site spacing. Previously reported deletions scanned through the TgnA leader also agreed with annotation of the TgnB RS as necessary and sufficient for modification, where only deletions that included RS residues were unmodified [58]. Both the TruE and PlpA2 peptides included sequences N-terminal to the RS, removal of which was well-tolerated by each respective modifying enzyme, with fraction modified similar to that of full-length leader (FIG. 48A and FIG. 50A). Removal of residues between the LynD RS and the core was also tolerated by LynD (FIG. 50A). The PaaP RS consisted of nearly the entire leader, so leader truncations were not tested, but truncations to the follower peptide were tested to determine if it is necessary for modification. Previous work has shown that truncation or removal of the follower peptide is not tolerated by PaaA [78], but that the follower sequence can be mutated without breaking modification [59]. Similarly, removal of only three amino acids from the C-terminus of the follower was observed to decrease modification from 89% to 39%, with removal of nine amino acids breaking modification. While the sequence is important for modification, scanning site saturation mutagenesis of the entire peptide showed that the sequence in the follower is mutable, unlike residues in the RS of the leader[59]. Based on this, the follower was treated as an extension of the core peptide, rather than as a “structural” element of the peptide. The sequence constraints in the follower were therefore elucidated later as part of the core sequence motif.

[0256] The final recognition site sequences are outlined in boxes in FIG. 10D and are listed in Table 5. The sites were similarly sized, ranging from 9-12 amino acids, but varied in their placement in the leader, ranging from N-terminal (TgnB) to C-terminal (PaaA and PlpXY) and between (LynD). The sites contained large numbers of hydrophobic amino acids (L/I/A/F/V/P), in agreement with observations that hydrophobic interactions are a contributor to affinity between modifying enzymes and RSs [14] and protein-protein interactions as a whole [101]. They differed in the charged residues present, with LynD and PlpXY containing negatively charged glutamate residues and PaaA and TgnB containing a single arginine and lysine, respectively. Given the helicity of the RSs (all but TgnB), charged residues may be solvent exposed (opposite the binding face), or participate in salt-bridges as part of the interaction. The annotated RSs also agreed with previously published work on these enzymes, when available. Deletion of amino acids in the N-terminus of TgnA precluded modification by TgnB [58], in agreement with annotation of the RS at the N-terminus of the leader. The four leader residues previously shown to be important for modification of PaaP by PaaA [59] were all included within the annotated RS. The LynD RS, as annotated, has previously been used both in vivo and in vitro with LynD and homologs of LynD [39, 42, 102]. This is the first known description of the PlpXY RS in PlpA2.

### Determination of RS Spacing Constraints

[0257] Variants were designed to alter the spacing d between the RS and the modified residue. An alternative would be to define d as the distance to the start of the core sequence, which could be more intuitive for enzymes that modify multiple core amino acids, such as TgnB [58]. However, the distance to the modification was selected as it was more likely to be the physical distance to the modification site itself that influences modification rather than the distance to the core/leader cleavage site. Additionally, during forward engineering of precursor peptides, it functions as a constraint on core length by keeping modifications from being allowed at infinite core positions away from the leader. As such, d was defined as the number of residues between the RS and the modified amino acid. If multiple amino acids were modified (for example the two lactone cycles in TgnB modification), it was the distance to the first modified amino acid.

[0258] Changing d from its optimal value was expected to lead to lower modification efficiencies. In its simplest form, this can be treated as an energy well, where a wider well corresponds to more core positions being modifiable if RS position in the leader is kept constant. In contrast, a steep well indicates that the modification can only occur at a single residue, optimally spaced from the RS. A spring model is the simplest way to model this effect, which has been applied to similar biophysical phenomena, such as modeling the impact on ribosome binding that results from different spacing between the Shine-Delgarno and ATG start sites [88]. Using a spring model, RS-to-modification distances less than optimal would be “stretched” for modification, while distances greater than optimal would be “compressed”. The following equation can be derived from Hooke's Law,

$$ΔΔ {G}_{n} = \frac{1}{2} [ {κ}_{s} H ( d - {d}_{0} ) {( d - {d}_{0} )}^{2} + {κ}_{c} ( 1 - H ( d - {d}_{0} ) ) {( d - {d}_{0} )}^{2} ] \qquad ( Equation 3 )$$

where d₀ is the optimum spacing, κₛ and κ_{c} are the stretching and compression spring constants, and H(x) is a step function. Equation 3 could be changed to reflect other functions; for example, it might take on the form of a steep step function if there is a distance at which suddenly an enzyme is no longer active. It also does not have to be monotonic, with more complex forms modeling enzymes that exhibit multiple local minima or periodic behavior. In its current form, the stretching and compression constants define the width of the energy well described above, with small values of κ corresponding to a wide energy well with high spacing tolerance and large values corresponding to a narrow energy well with low spacing tolerance.

[0259] Leader variants were designed for each modifying enzyme to perturb the RS spacing, starting with TgnB. TgnA* has 35 residues between the RS and the first modified residue, with 31 of those being in the leader. Five truncation variants were designed by removing residues at the C-terminus of the leader, starting with two amino acids and increasing in increments of four amino acids to the longest truncation of 18 amino acids, representing over half of the spacer. Three insertion variants were also designed using a TEV cleavage site (amino acid sequence ENLYFQ (SEQ ID NO: 111)) and glycines as a spacer: the TEV site alone is a 6 amino acid insertion, TEV site followed by triple-glycine is +9 amino acids, and TEV site flanked by triple-glycines is +12. Each of these 8 variants was assayed for modification, and the fraction modified for the variants is shown in FIG. 10E. Values were converted to ΔΔG. (using equation 1) for each variant and plotted against the RS-modification distance. With the exception of the longest insertion variant, increased spacing deviations from optimal corresponded with decreased modification. The trend was fit with equation 3 to calculate the stretching and compression spring constants (Table 6) as 30 and 100 J·mol⁻¹·AA⁻², respectively, where do is set to the wild-type distance. These values implied that the enzyme was more tolerant of shorter spacer distances than longer, surprising given that the wild-type TgnA peptide contains a leader with three cores in tandem [58], with leader to modification distances of 35, 56, and 77. With a compression constant of 100 J·mol⁻¹·AA⁻², the farthest modification was predicted to have a ΔΔGₙ of 176.6 kJ/mol, effectively unmodified. While the data collected was used to fit the spring constants, this data indicated that a more complicated model, including variations of equation 3 with periodic behavior, may be necessary for distributive/multi-core enzymes like TgnB [103]. It is worth noting that modification of the full TgnA peptide using this expression platform was not observed[104], so it is also possible that the TgnA* spacing parameters described here are specific to the single core TgnA* peptide expressed as a SUMO fusion.

TABLE 6
RS spacing constraints
Parameter^{a}

| Enzyme | d₀ | κ₁ | κ₂ |
|---|---|---|---|
| TgnB | 37 | 100 | 30 |
| PlpXY | 6 | 20 | 3390 |
| PaaA | 0 | 40000^{b} | 40000^{b} |
| LynD | 11 | 8 | 100 |

^{a}Parameters for Equation 3.
^{b}No indel tolerated; Fit for ΔΔGₙ = 20 at d-d₀ = 1

[0260] PlpXY is known to be tolerant to varying core positions, since there are two precursor peptides associated with the cluster that have RS to modification distances of 6 (PlpA2) and 21 (PlpA1). The leader peptide (and RS sequence) of PlpA1 differs from PlpA2, so modification of the two was not directly compared, since modification differences due to distance cannot be separated from RS sequence differences. Instead, spacing parameters were elucidated similarly to TgnA*, using engineered insertion/deletion variants of PlpA2. Since the RS is one residue away from the C-terminus of the leader peptide and the modified tyrosine is also close to the N-terminus of the core, only three deletion variants were tested: deletion of the final glycine (−1), the final glycine and first two residues of the core (−3), and the final glycine and first four residues of the core (−5). The same insertion variants were tested as for TgnA*/B: insertion of a TEV cleavage site (+6), TEV cleavage site followed by a triple-glycine (+9), and TEV cleavage site flanked by triple-glycines (+12). The variants were assayed for modification, with variant effect on modification converted to ΔΔGₙ and fit with spring constants (FIG. 10D and Table 6). As expected, increases to RS-to-modification distance were well tolerated, with variants having near-wild-type modification, in agreement with the large spacing observed in PlpA1.

[0261] The PaaA RS has very rigid placement restrictions (FIG. 49A). The RS in the leader directly abuts the modified residues in the core, making it impossible to delete amino acids. Deletions that cut into the defined RS were found to abolish modification, while adding a small GGG spacer between the RS and the modification was also not tolerated. Therefore, a ΔΔGₙ of 20 was assigned for d values −1 and +1 from d₀, and solved for both κ constants using those values, with ΔΔGₙ=0 at d₀.

[0262] LynD, and homologous cyanobactin heterocyclases, are known to be tolerant to spacing changes in the precursor peptide [39, 42]. In nature, it modifies the LynE peptide, which includes the same “LAELSEEAL (SEQ ID NO: 110)” RS defined in the truncated TruE* peptide, with three tandem cores and modified cystines spaced 9, 12, 24, 27, 39, and 42 amino acids from the RS [39]. In the full-length TruE peptide, which was modified with LynD in this Example, LynD modifies cysteines in two tandem cores, with RS-to-modification distances of 6 and 27 amino acids (FIG. 50A). Modification of the full-length TruE peptide was compared with modification of the truncated TruE* peptide to identify a compression spring constant of 8 J·mol⁻¹·AA⁻². A single deletion variant, with five of the six leader residues between the RS and core removed, was fit with a stretching spring constant of 100 J·mol⁻¹·AA⁻² and tested.

### Tolerance to Core Mutations

[0263] Libraries varying the core of each RiPP were made to determine modifying enzyme tolerance to different amino acids. In general, the approach of using scanning site saturation mutagenesis (SSSM) was followed and applied to positions surrounding the modified residue(s) [56, 59]. Degenerate oligonucleotides, with codons replaced by NNK mixed bases, were used to build libraries and isolate core sequence variants. Typically, a single residue would be varied at a time, with all single-residue NNK libraries pooled together such that an individual library member has a random amino acid at a single random position (also known as a saturation mutagenesis single variant library or single codon randomization library, abbreviated as sSSSM for single SSSM). The pooled oligonucleotide libraries were cloned and individual variants were isolated and sequence verified. To increase coverage at each position, the number of core positions in the libraries was decreased and included only those surrounding and necessary for the modification. For cores with long C-terminal “tails” after the modification, truncations were made to the peptide's C-terminus to determine the minimal sequence necessary for modification. All four modifications were close to the N-terminus of the core, so the entire core N-terminal to the modification was always included in the libraries. PaaA and TgnB modifications used wild-type leaders for modification, while leaders with long N-terminal regions before the RS (TruE* and PlpA2) used N-terminal leader truncations shown to be sufficient for modification during leader/RS characterization (FIGS. 48A-48B and 50A-50B). The core libraries were cloned into the same expression system described above and used with identical growth/expression conditions.

[0264] The raw data for the TgnA* core library are shown in FIG. 11A. For this library, the entire core sequence of 21 amino acids were included and 48 single-mutant variants were generated and analyzed. The library was composed of 21 oligonucleotides, each with a different core codon replaced by NNK, pooled together and assembled with the leader peptide into the peptide expression plasmid. The resulting sSSSM library was then co-transformed with the TgnB expression plasmid, and plated on agar such that each colony contained a unique peptide variant along with the modifying enzyme. Individual colonies were picked and peptide sequence verified before assaying for modification. As can be seen in FIG. 11A, the variants span all levels of modification. A criterion of 50% of the wild-type activity was set to consider an amino acid as being accepted. This conservative threshold was selected because, assuming additive effects, the multiple mutations that would arise from de novo peptide design would rapidly decrease the fraction modified. Of the variants tested, 25, or 52%, were modified above this threshold (FIG. 47B). Accepted amino acids at each position were then compiled into a core summary motif, shown in FIG. 47C, where accepted amino acids appear below the wild-type sequence and unaccepted appear above the sequence. Finally, amino acids that were observed unallowed/allowed at each position were compared with the other two core repeats present in the TgnA peptide (only one core repeat was used in TgnA*). Only a single amino acid of overlap was present between observed amino acid variants and the other natural cores—core position 20 is a tyrosine in the other cores. Though tyrosine was originally disallowed at position 20 since its fraction modified was slightly below the cutoff, the motif was updated to include it based on its presence in the natural core. Based on the same principle, the final core motif was updated to include all of the amino acids present in the other wild-type cores, and used to generate the motif shown in FIG. 11B.

[0265] Although the TgnA* library was designed to generate single-mutant variants, several variants were isolated with two mutations and one with three, which provided an opportunity to investigate mutation additivity (FIGS. 47A-47D). Mutations are additive when the free energy change of a double mutant is the sum of the individual mutations, ΔΔG₁₂=ΔΔG₁+ΔΔG₂. This is equivalent to multiplying the modified ratio from individual mutations for the double mutant. Two instances of non-additivity were found, both of which showed the compensatory recovery of a bad mutation. For example, in TgnA, the A14S mutation decreased the activity, but this could be compensated when both E9L and T4L were present, returning the triple mutant to wild-type activity. Similarly, P2L could be recovered by adding Y19A. Non-additivity was not observed for any of the other leader-dependent enzymes.

[0266] For PlpA2 modification by PlpXY, truncations to the C-terminus were first investigated to identify residues necessary for modification. Increments of three amino acids were removed from the C-terminus of the peptide until modification broke. Removal of 12 amino acids was tolerated, with fraction modified within error of modification of the wild-type peptide, while removal of 15 amino acids was not modified at all. This was in agreement with previous work which showed that the proline at position 11 was necessary for modification [18]. Based on this data, a library was built to include positions 1-12 of the core peptide. A similar sSSSM library was built as described for TgnA*, with 41 single-mutation variants isolated and assayed. In contrast to TgnA*, only half of the variants were tolerated, with one variant removed because of high variance amongst replicates (FIG. 48B). From this data, G7, V9, and P11 were observed to be restricted positions, with all tested mutations at those positions showing no activity (FIG. 48B). A core motif was built for PlpA2, shown in FIG. 11B. The observations were similar to those of Morinaka, et al[18]. They observed G7 to be essential, with replacement by an alanine not tolerated. At the methionine at position 5, mutations with 30 L, V, W, D, and T were tested, with L well tolerated, V poorly tolerated, and no tolerance for W, D, or T. Morinaka, et al annotated L and V as tolerated at that position, and F and E as not (similar to W and D, respectively)[18].

[0267] Based both on the six cysteines modified by LynD in the native LynE substrate [39] and the two cysteines modified in the TruE substrate, LynD was anticipated to be extremely permissive of different amino acid residues surrounding the modified cysteine residue. In the TruE* peptide, both the entire core (five amino acids preceding the modification) and the follower (four amino acids after the modification) were included in the library, with the follower treated as core peptide rather than a structural element (similarly to PaaP follower in its library). Given the number of residues in the library, and the potentially high tolerance of diverse amino acids, a saturation mutagenesis library of all positions simultaneously was used, allowing the core sequence to be xxxxxCxxxx (SEQ ID NO: 112), where x is any amino acid. A single degenerate oligonucleotide, with all core and follower codons except the cysteine replaced by NNK, was used to build the library. In the resultant variants, peptides with more than one cysteine were screened out, since it was impossible to tell which ones were modified via LC-MS. Twenty-four variants were isolated and assayed, in addition to 10 variants that were synthesized to have charged and/or bulky polar residues flanking the modified cysteine (native flanking residues are usually small and/or hydrophobic). All of the custom/designed variants were well modified, showing that LynD tolerated charged or bulky polar side chains at the modification site. Of the 24 random variants, 17 were modified above the half-of-wild-type threshold. At all of the positions included in the library, tolerated amino acids were physiochemically diverse, consistently including 5-6 of the 6 physicochemical groupings used to classify amino acids (positive, negative, polar, aliphatic, aromatic, G/P). Based on this, the motif was trimmed to include only the positions adjacent to the modified cysteine. Those two positions were updated to allow 19 amino acids, all except cysteine, since modification of adjacent cysteines was not investigated (FIG. 11B).

### Tailoring Enzyme Tolerance to Core Mutations

[0268] The same expression/analysis pipeline described for leader-dependent modifying enzymes was applied to leader-independent tailoring enzymes. Tailoring enzymes do not bind recognition sites in the leader, instead they bind directly to the site of modification in the core, with specificity presumably determined by the amino acids around the modification. As such, these enzymes have no RS or RS spacing constraints, but do have core sequence constraints that can be elucidated similarly to the core constraints of leader-dependent modifying enzymes. To maintain consistency between all enzymes, expression conditions were equivalent to those described for modifying enzymes: peptides were expressed as a SUMO fusion and expressed and modified in TB media in 96-well plate format.

[0269] Of the nine enzymes selected for characterization (Table 5), five were leader-independent tailoring enzymes. One of the enzymes modifies the side chain of an internal peptide residue while others modify the C-terminal residue side chain or carboxyl group. In contrast to the leader-dependent modifying enzymes, where all were from different RiPP classes, three of the five tailoring enzymes came from lasso peptide clusters, highlighting the compatibility of lasso peptide tailoring enzymes have with heterologous expression in this platform. The tailoring enzymes catalyze diverse transformations and have been sourced from diverse bacterial species (Table 5):

[0270] (1) EpiD is an oxidative decarboxylase from the epidermin biosynthetic pathway, a type 1 lanthipeptide antibiotic identified from Staphylococcus epidermidis[105, 106]. It is an integral tailoring enzyme for formation of the aviCys macrocyclization, though without the other enzymes in the pathway the aviCys cycle is not formed and decarboxylation results in an enethiolate [107], with a corresponding loss of mass of −46 Da. This modification is valuable both for its potential for forming constrained aviCys macrocycles[6] when combined with other enzymes and also for removing the carboxy group, decreasing polarity and potentially increasing membrane permeability[108, 109].

[0271] (2) PalS is a glycosyltransferase that catalyzes the class-defining glycosylation of pallidocin, a glycocin antibiotic[110]. In pallidocin, a cysteine is glycosylated, causing a gain of mass of +162 Da. Glycosylation can play diverse roles in small molecules, often used in antibiotics to inhibit peptidoglycan biosynthesis by glycopeptides[111] and now proposed as a strategy for improving peptide bioavailability during drug design[112].

[0272] (3) LasF is a methyltransferase from the lasso peptide antibiotic lassomycin[l13]. It methylates the carboxyl group on the C-terminus to form a methyl ester, causing a gain in mass of +14 Da. Similar to EpiD decarboxylation, the methyl ester is uncharged (unlike the carboxyl group), potentially aiding membrane permeability[108, 109].

[0273] (4) ThcoK and (5) PadeK are both kinases from lasso peptide clusters that install 1-3 phosphates on the C-terminal serine of their respective peptides[80, 81]. Because multiple phosphate groups can be added, the gain in mass can be +80, +160, and +240, corresponding to +1, +2, and +3 phosphates, respectively. Naturally, their biological role is unknown, but synthetically they can be used to modify substrate pKa/log P properties or create phosphopeptide mimetics that act as signal transduction inhibitors[114]. Both ThcoK and PadeK were included to enable phosphorylation of a greater number of peptides by investigating two kinases with presumably different sequence constraints. Since these enzymes install a variable number of phosphates, any number of phosphates to be “modified” was considered, meaning that fraction modified is the fraction of peptide that has 1, 2, or 3 phosphates installed.

[0274] Each of these tailoring enzymes catalyze a mass shift that can be assayed via LC-MS, in the same manner that leader-dependent modification was assayed. The five tailoring enzymes and their respective wild-type precursor peptides were first assayed for modification (FIG. 46). Fraction of peptide modified varied between the enzymes (0.29-1.0). PadeK was the only poorly modified enzyme, which was surprising since both previous work[81] and its homolog ThcoK showed efficient modification (FIG. 46). Peptide-enzyme pairs had similar modification between replicates (fraction modified standard deviation of 0.026-0.081), except PalA modification by PalS, which had a standard deviation of 0.58. The large variance between PalA replicates was caused by the detection limit of the LC-MS: poor LC-MS signal was observed for wild-type PalA peptide due to proteolytic cleavage of the leader by endogenous E. coli proteases. This caused full length (uncut) peptide to be low abundance (near the detection limit of the LC-MS), and in two replicates unmodified peptide did not pass detection thresholds (fraction modified is 1.0) while in the third replicate both modified and unmodified peptide did not pass (fraction modified is assigned 0.0). This problem was solved by removal of the leader (and most of the core peptide) during elucidation of the core motif, described further below.

[0275] Similar to leader-dependent modifying enzymes, core motifs were elucidated using scanning site saturation mutagenesis. Since tailoring enzymes do not require the leader (or a majority of the core), most of the precursor peptide was truncated to investigate only those residues surrounding the modification. Each peptide library was limited to eight varying positions. For tailoring enzymes that modified the amino acid side chain (PadeK, ThcoK, and PalS), the modified residue was not included in the library since it was necessary for modification, so the total peptide size was truncated to 9 amino acids. For the two enzymes that modified the carboxy group on the C-terminus (LasF and EpiD), the C-terminal residue was included in the library, so the total peptide size was truncated to the C-terminal 8 amino acids. The positions were numbered based on their position in the wild-type (full-length) core, not their position in the truncated version.

[0276] Initial libraries varying single amino acids at a time (like those used with TgnB, PlpXY, and PaaA) resulted in variants that were well modified (FIGS. 51A-51C, 52A-52C, 53A-53C, 54A-54C, and 55A-55C), indicating that the core motifs were very permissive. To accelerate exploration of amino acid sequence space, libraries that had multiple mutated positions were also designed. Several library architectures were used, including NNK-NNK (two adjacent randomized positions, abbreviated dSSSM for double SSSM), NNK—NNK—NNK (three adjacent randomized positions, abbreviated tSSSM for triple SSSM) or NNK-www-NNK (two randomized positions flanking a wild-type residue, w denoting a wild-type nucleotide, abbreviated dfSSSM for double flanking SSSM). These architectures were scanned through the truncated core and pooled such that variants had 2-3 mutated AAs at a random location. To build the motifs (FIG. 11C), the same cut-off of 50% of modification of the truncated wild-type peptide sequence was used for acceptance of amino acids at each position. When building summaries of tolerated amino acids at each position, unallowed amino acids were assigned using only single-mutation data, since the amino acid responsible for decreasing modification below the 50% threshold could not be determined when there were multiple mutations in a variant.

[0277] Finally, each motif was analyzed and minimized based on tolerated amino acids at each position. If every observed mutant at a position was accepted in the tolerance summary, and those tolerated amino acids spanned 4+ of the 6 physicochemical amino acid classes used, the position was annotated as unconstrained and allowed to be any amino acid. Unconstrained positions on the edge of a motif could then be removed from the motif entirely. During golden-gate/typeIIs assembly of the libraries, assembly bias that lowered the number of amino acid variants at the N- and C-termini of the library was observed, so terminal positions were often removed from the motif if they didn't meet the 4+ criteria above, but had unconstrained positions between them and the modified residue. For example, in the PadeK tolerance summary (FIG. 54B), core positions E17, D18, and V19 met the criteria to be unconstrained, but position D16 at the N-terminus only had one mutant observed due to assembly bias. It is unlikely that position 16 was constrained, while 17, 18, and 19 were not, so positions 16 -19 were removed from the PadeK motif (FIG. 11C).

[0278] The EpiA peptide was truncated to include the eight C-terminal residues (positions 15 through 22). EpiD modification was investigated using sSSSM, dSSSM, and dfSSSM libraries, each of which were cloned separately and a total of 33 variants isolated and assayed between the libraries. For many of the variants, the replicates varied more than what was observed for other enzyme peptide variants. Analysis of the raw chromatograms showed large peaks that were above the detection limit, but the spectra were noisier than spectra from other peptides/enzymes, for unknown reasons. Despite the lower quality data, trends were visible: mutations close to the N-terminus were observed to be well modified and those close to the C-terminus (modification site) were poorly modified. Position 20 did not tolerate negatively charged aspartate/glutamate amino acids, while hydrophobic (L), polar (S, N, and Y), and positively charged (R) amino acids were tolerated. Positions 17, 18, and 19 were found to be very permissive and all mutations at positions 15 and 16 were tolerated, so positions 15-19 were removed from the core motif, which is shown in FIG. 11C. EpiD substrate tolerance has been investigated in vitro, using neutral loss mass spectrometry to measure modification[54]. The final three residues were also annotated as important for modification, but observed V, I, L, F, Y, and W tolerated at position 20 and A, S, V, T, C, I, and L tolerated at position 21 (with all other amino acids measured and not tolerated). None of the tolerated amino acids were not tolerated in the variants tested, but several additional amino acids were observed to be tolerated at both of those positions (N, R, and S at position 20 and H at position 21). The discrepancy may be explained by non-additive effects described earlier—those amino acids were observed as tolerated based on variants that included multiple mutations, but they may not be tolerated in isolation. Indeed, Y20S was not tolerated in isolation, but modification was recovered with S19N mutation (FIG. 51A).

[0279] The PalA peptide was truncated to include the four amino acids to either side of the glycosylated cysteine (9 amino acids total). Three libraries were designed: sSSSM, dSSSM, and dfSSSM, with 74 total variants assayed for modification by PalS (Supplementary Note 10). A majority of variants (40) were 100% modified, with only 14 variants showing intermediate levels of modification and the remaining 20 not tolerated. Of those that weren't tolerated, all but two included mutations flanking the modified cysteine (positions 24 and 26). The remaining two were G22F and G27I single mutation variants, both surprising given the diverse amino acids tolerated at both of those positions. While there were multiple examples of variants with overlapping amino acids at a position, investigating non-additivity was impossible, since most variants were not at quasi-steady state but were fully modified. Mutation S29G had a lower fraction modified (0.81) than S29G with Y28F (1.0), but was within the S29G standard deviation of +/−0.24. In another example, F23K was fully modified while F23K with G24R as poorly modified (0.19). Assuming additivity, G24R was the offending mutation, except F23G with G24R was well modified (0.79). This may be an example of non-additivity, but because the F23K single mutant variant was fully modified it's possible that the F23K mutation was detrimental to modification, but not enough to lower the fraction modified below 1.0. Only when combined with another slightly detrimental mutation, G24R, did F23K mutation bring modification down significantly. Without a clear indication of non-additivity, the core tolerance summary was assembled using all the variants, observed positions 21, 23, and 28 to be unconstrained, and updated the core motif to include positions 22-27 (FIG. 11C).

[0280] The LasA peptide was truncated to include the C-terminal eight amino acids, all of which were varied in the library. Both sSSSM and dSSSM libraries were constructed, with 37 variants isolated and assayed for modification. Mutations to LasF had greater impact on the activity of the enzyme compared to variants for other tailoring enzymes. None of the variants with multiple mutations were well modified, and only 5 single-mutant variants had wild-type levels of modification. Hydrophobic amino acids (A, V, L, F, and W) were generally allowed in all positions. Mutation of the C-terminal isoleucine to tyrosine and cysteine was not tolerated, in agreement with data for a LasF homolog showing mutation of the C-terminal residue led to a 4-fold reduction in methylation. The variant data was used to build the core tolerance summary (FIG. 53B) and core motif (FIG. 11C), with no other physicochemical or positional trends.

[0281] PadeK and ThcoK were both truncated to include the C-terminal nine amino acids, with the final serine not included in the library since its side chain is modified. Both of these enzymes were very tolerant to diverse core sequences, so sSSSM, dSSSM, dfSSSM, and tSSSM libraries were all used to elucidate core constraints. In total, 31 PadeA variants and 34 ThcoA variants were tested. ThcoK was the most tolerant enzyme investigated: only one variant was below the modification threshold, with the mutation adjacent to the modified cysteine. Positions 16 through 21 all passed the criteria for being unconstrained, so positions 15 through 21 were removed from the motif, leaving only the modified serine, and the preceding residue. PadeK was more constrained: it only showed high specificity at the penultimate core residue and at core positions 22 and 21, respectively (adjacent to the ultimate/modified serine) (FIG. 11C). The ThcoK motif was decreased to the final two residues and the PadeK motif was decreased to the final four residues. Only 2 of 20 random single-mutation variants in ThcoA decreased ThcoK modification below 50%, and both were adjacent to the modified residue (FIG. 55A).

Design of Peptides with Multiple PTMs

[0282] A design algorithm was developed to create a library of core variants enriched for a desired modification pattern (FIG. 12A). Each modification imposes new constraints on the precursor peptide sequence. To this end, the algorithm had two objectives. First, the leader must place the RS sequences with the correct spacing to the amino acids they modify. If present, gaps between RSs and/or between the RS and the core must be filled by the algorithm. Second, the constraints on the core sequence have to be combined to create a pattern of tolerated amino acids for all of the modifications. The core also needs to be scanned to predict potential off-target modifications.

[0283] Leader design proceeds by moving the RS sequences with respect to the core and calculating their contribution to a scoring function. The maximum leader length is a parameter that can be set in the algorithm, with a default value of L=40 amino acids. The score S of RS placement m is the predicted effect of RS-to-modification distance d compared to optimal distance d₀.

$${S}_{m} {e}^{\frac{- {κ}_{1} H ( d - {d}_{0} ) ( d - {d}_{0} ) - {κ}_{2} ( 1 - H ( d - {d}_{0} ) ) ( d - {d}_{0} )}{2 RT}} \qquad ( Equation 4 )$$

which is bounded to the range 0-1 (inclusive). The total score for a RS placement in a leader p for a set of M enzymes is defined as

Sₚ=Πₘ₌₁^{N}Sₘ (Equation 5)

The algorithm then seeks to identify the optimum p that maximizes the score. This can be found simply by enumerating all possible placement combinations of the RS sequences.

[0284] There are several use cases in which it is beneficial to save space by overlapping the RS sequences, as sometimes occurs in natural leaders. For instance, the constraints on d might be too rigid to separate them. It could also free other space in the leader for additional enzymes to bind. Finally, shorter leaders could facilitate the use of specific DNA oligosynthesis techniques in building a library. To this end, an algorithmic approach was developed to evaluate overlapping RS sequences. If two RS sequences could overlap without any amino acid mismatches, then this was done without penalty. However, in most cases, overlap would require an imperfect RS for at least one enzyme. To capture this, an additional term was calculated to modify the score,

$${S}_{mn} = \frac{( a - z ) ( b - z )}{ab} . \qquad ( Equation 6 )$$

In Equation 6, a and b are the lengths of RS1 and RS2 and z is the number of mismatched residues (BLOSUM62 score less than or equal to 0) in the overlap of the two recognition sites. The fraction was bounded to the range of 0-1 (inclusive) and simply included in the product of terms for the total score (Equation 5). If more than two RSs were being combined, more than one pair of RSs may overlap, and Sₘₙ was calculated for each overlapping pair and included with Equation 5. At mismatched overlapping RS positions, a random choice between the two possible amino acids can be made, or one RS can be given priority over the other in selecting the amino acid.

[0285] Typically, if tolerated, a TEV protease site was included between the leader and the core so the core could be released and recovered after purification. When used, the TEV sequence constraints were treated as an additional leader-dependent modifying enzyme. The six amino acid TEV sequence ENLYFQ (SEQ ID NO: 111) was added as an RS, with fixed placement (high κ constants), such that it contributed to the calculation of Sₚ. TEV cleavage occurs after this sequence and was permissive to different amino acids at the first position of the core, except P, and reduced efficiency for L/E/I/V [115]. This core constraint was added as a core motif, with placement specified at position 1 of the core. In addition to this, there may be a gap between the RS sequences or between the last RS and the core. There are multiple options for filling these gaps provided by the algorithm: (1) GGS repeats; (2) choosing random amino acids (additional sequence constraints can be optionally added at any leader position); (3) spacer sequences taken from wild-type leaders of the enzymes being combined; and (4) nothing, the leader is returned with gaps to be filled in manually.

[0286] The final step was to design the core (FIG. 12A). First, the positions to be modified were fixed. The rules for each enzyme were then aligned to these positions. They were then combined to create a motif over the length of the sequence, where an amino acid was only allowed at a residue if it was allowed by all the enzymes at that position. Additional constraints can be added by the user, at any position, to encode a pharmacophore of interest, limit combinatorial complexity, or influence hydrophobicity or other physicochemical properties. Positions not restricted by an enzyme sequence constraint can be any amino acid. A library can then be generated of size N that randomly assigns amino acids from those allowed at each position. Optionally, this library can be filtered to remove sequences that have motifs at off-target sites that could potentially be modified by the enzymes. The output can serve to guide pooled oligo synthesis strategies.

### Forward Design of a Synthetic RiPP

[0287] The algorithm was applied to design precursor peptides that can be modified by four enzymes: two leader-dependent modifying enzymes (LynD and PlpXY), one tailoring enzyme (ThcoK), and TEV protease (FIGS. 12A-12B). The core was defined to be 13 amino acids, with a thiazoline, excised tyrosine and phosphorylated serine at positions 2, 6 and 13, respectively. TEV cleavage was specified at position 1. The LynD, PlpXY, and TEV recognition sequences had to be combined into the leader sequence. It was hypothesized that the LynD and PlpXY RSs could overlap because the alanine-scan variants through the RSs for both enzymes were well tolerated (FIGS. 50A and 48A), indicating sequence plasticity. Then, the scores of all combinations of the LynD and PlpXY sequences, including overlaps, were calculated. This is shown in FIG. 12A, where there is a pareto-optimal boundary between the best scores and minimum leader size. A variant was chosen that had a high score but shortened the leader by having the RS sequences overlap by six amino acids (two mismatches).

[0288] A core motif was then designed by combining the rules associated with the three enzymes and including the restriction from the TEV protease that a proline cannot appear in the first position. Considering the variability allowed at each position, this resulted in 21,000 peptides that conformed to the rules. This was in contrast to the ˜10¹³ peptides that would result from all 20 amino acids being allowed at all non-modified positions. An oligo pool was built and designed to access a subset of the allowed peptides and cloned and sequence verified one that matched the enzyme restrictions and ten that had imperfect matches (FIGS. 45A-45C). To enable modification with multiple enzymes, a Marionette derivative of NEB Express E. coli was used, such that all inducible systems were encoded in the genome. Enzyme genes lynD, plpXY, and thcoK were placed under aTc-, OHC14-, and cumate-inducible systems, respectively, and assembled together onto a spectinomycin-resistant p15A backbone (FIG. 12B). The engineered leader-core was cloned under the same IPTG-inducible expression plasmid used above, which included its own copy of lac (in addition to the lacI encoded in the Marionette genome cassette), but this did not affect peptide expression. This created an artificial biosynthetic gene cluster of four genes, all under independent, inducible, control.

[0289] Expression and peptide modification was investigated in the same manner as for individual enzymes. Each of the eleven peptide plasmids were co-transformed with the multi-enzyme plasmid. Overnight cultures were diluted 1:100 into TB media, fully induced after 3 hours at 30° C., and incubated for 20 hours. Cultures were then lysed, affinity purified, and assayed via LC-MS.

[0290] All possible combinations of modification were searched (dehydration from LynD modification (−18 Da), tyramine excision from PlpXY modification (−135 Da), and phosphorylation from ThcoK modification (+80 Da)). For four of the peptides, masses were identified that matched expected triple-modification masses, suggesting a success rate of 80% for the hybrid core motif. The peptide variant with the highest fraction of triply modified peptide was selected for validation.

[0291] The co-transformed strain was struck out, and three colonies were individually grown up at small scale, affinity purified, and TEV cleaved. The final molecule was assayed via LC-MS/MS, where the mass and observed fragments matched the expected peptide structure.

### DISCUSSION

[0292] This Example abstracted the substrate preferences of RiPP enzymes as “rules,” applicable to the constraint-based design of precursor peptides. Computational design can be used to guide the selection of enzymes to decorate a natural product [116], identify scaffolds to splice in a binding sequence [61, 117], or design large screening libraries enriched in modified peptides [62]. While RiPPs are generally very tolerant, the success rate declines rapidly as more constraints are added. For the example in FIGS. 12A and 12B, the enzyme rules estimated that only 1 in 300 million random peptides (holding the modified amino acids constant) would lead to a triply modified peptide. A library built according to these rules would contain 31,500 predicted unique compounds. Creating a large library for an exact set of core sequences has been historically difficult, where construction required random mutagenesis (e.g., NNK), but it is now trivial using custom pooled DNA synthesis services [118].

[0293] Chemical retrosynthetic planning algorithms use “rules,” extracted from the literature, to represent how a chemical moiety will be converted by a reaction [13, 119-121]. There is a trade-off between accuracy and path discovery: if every rule is specific to only one chemical, this would be the most reliable, but it would not be possible to predict paths to new chemicals. Algorithms balance these needs by specifying rules with respect to the number of atoms from the reaction center n; if n=0, then it is just the reaction itself and as n gets larger, this increases the accuracy as more of the chemical context is incorporated into the rule. This approach has been extended to enzymes using the same rules-based method of defining allowable enzyme substrates based on the substrate reaction center and surrounding atoms/functional groups [13].

[0294] Considering rules for RiPP enzymes, simply defining the chemistry performed by an enzyme and assuming perfect promiscuity for the other core positions is the philosophical equivalent to n=0. This assumption has implicitly appeared in the literature for RiPP design when highly tolerant enzymes were combined without restricting the core sequence [11, 23-25, 27]. Simultaneously, other retrosynthesis studies have engineered multiply modified peptides by generating peptide chimeras, with an enzyme effectively modifying its wild-type substrate [74, 76, 77], the equivalent of a large and un-engineerable n-value. The rules defined in this Example are the next level of constraints, representing the minimal information to capture substrate specificity. However, they incorporate a number of assumptions, including the additive combination of amino acid tolerances derived from single-mutant data. Indeed, incidences of non-additive compensatory effects from multiple mutations were observed. The next level of accuracy in rules could account for higher-order effects requiring more sequence knowledge of the core, such as charge, hydrophobicity, secondary structure, and loop entropy, all of which have been cited as important in determining RiPP enzyme specificity [22, 26, 42, 45, 47, 76, 122]. Similarly, in the leader it was assumed that recognition sites and spacing alone were determining factors of modification, but TgnB recognition site spacing variants varied in modification based solely on spacer sequence, indicating that leader sequence outside of the recognition site may affect modification (FIG. 10D), possibly due to spacer structure/flexibility. Mapping additional leader/core rules could be aided with artificial intelligence, which has been applied for this purpose to define rules for chemical retrosynthesis and has been applied to predict protein-protein interactions[121, 123].

[0295] However, many RiPP enzyme have properties, or gaps in knowledge, that make their function difficult to capture as a “rule.” Enzymes with wide RS spacing tolerance are often progressive, with difficult-to-predict behavior where single leader mutations change the modification pattern [20, 32, 34]. Kinetics are also a complicating factor, as enzymes in the same pathway can have orders-of-magnitude differences in time scales, from less than an hour to days[10, 33, 36, 124]. Imperfect leader sequences have been observed to alter enzyme kinetics, not just binding[33]. The order of operations also matters for cases in which later modifications require earlier ones to occur, for example, when a cyclization or epimerization orients an amino acid such that it is accessible for a subsequent modification[20, 30, 32, 61, 125, 126]. Tailoring enzymes can require that the released core peptide adopt a particular shape [42, 47, 52, 127].

[0296] This Example provides a new type of RiPP enzyme mining effort that differs from the approach of discovering new bioactive compounds by finding and reconstructing entire gene clusters from metagenomics data [65, 128]. Screens can be established to identify modifying enzymes along with simple approaches to define the minimal rule sets for their use. Because the goal is to combine them into a pathway, these enzymes need to be screened under a common set of conditions, whether it be in vivo or in vitro [76] and jettisoning those that do not work in this standardized context or that exhibit odd or unpredictable behaviors. These conditions may not reveal the precise role of enzymes in nature, but they provide the necessary information for forward design of artificial pathways. The “ideal” enzyme for retrosynthesis can also begin to be defined. One might think that it is a very tolerant enzyme regarding spacing to the modification, but broad substrate specificity can lead to unpredictable modification of multiple core residues and slow kinetics [33]. Instead, when given the option, it may better to have multiple enzymes on hand that differ in the distance from the RS where they modify their residue, such as appears to be the case in bottromycin biosynthesis [21]. Enzyme engineering, such as directed evolution, could be used to widen or tune substrate specificity specifically for the purpose of retrosynthesis. On last count, there are 300,000 RiPP clusters in the genomic databases with 4.6 million enzymes spanning ˜40 classes [129-134]. Finding subsets that work well together and characterizing their rules under common conditions would enable an enormous functional space to be algorithmically or combinatorially explored, providing unprecedented access to an emerging therapeutic modality: medium-sized constrained molecules, which are already showing promise for disrupting protein-protein interactions and other therapeutic targets that have traditionally been considered “undruggable”.

### Materials and Methods

### Strains, Plasmids, Media, and Chemicals.

[0297] E. coli NEB 10-beta (C3019I, New England BioLabs, Ipswich, Mass., USA) was used for all routine cloning. E. coli NEB Express (C2523I, New England BioLabs, Ipswich, Mass., USA) was used to express precursor peptides with single modifying enzymes, and the Marionette derivative of E. coli NEB Express (Marionette X) was used to express precursor peptides with multiple modifying enzymes. Plasmids for precursor peptide expression and modifying enzyme expression were used as follows: precursor peptide genes used a pSC101 origin variant (var 2) [87] and single modifying enzyme plasmids contained p15A origins of replication and kanamycin resistance. Plasmids with multiple modifying enzymes contained p15A origins of replication and spectinomycin resistance. LB-Miller (B244620, BD, Franklin Lakes, N.J., USA) and TB (T0311, Teknova, Hollister, Calif., USA) supplemented with 0.4% glycerol (BDH1172-4LP, VWR, OH, USA) were used for peptide expression and modification. 2xYT liquid media (B244020, BD, Franklin Lakes, N.J., USA) and 2xYT+2% agar (B214010, BD, Franklin Lakes, N.J., USA) plates were used for routine cloning and strain maintenance. SOB liquid media (S0210, Teknova, Hollister, Calif., USA) was used for making competent cells. SOC liquid media (B9020S, New England BioLabs, Iwsich, Mass., USA) was used for outgrowth. Cells were induced with the following chemicals: cuminic acid ≥98% purity from Millipore Sigma (268402, Millipore Sigma, Saint Louis, Mo., USA) added as 1000× stock (200 mM) in EtOH or DMSO; isopropyl β-D-1-thiogalactopyranoside (IPTG) ≥99% purity (I2481C, Gold Biotechnology, Saint Louis, Mo., USA) added as 1000× stock (1 M) in water or DMSO. Cells were selected with the following antibiotics: kanamycin (K-120-10, Gold Biotechnology, Saint Louis, Mo., USA) as 1000× stock (50 mg/ml in H2O); carbenicillin (C-103-5, Gold Biotechnology, Saint Louis, Mo., USA) added as 1000× stock (100 mg/ml in H2O); spectinomycin (22189-32-8, Gold Biotechnology, Saint Louis, Mo., USA). Liquid chromatography was performed with Optima Acetonitrile (A996-4, Thermo Fisher Scientific, MA, USA) and water (Milli-Q Advantage A10, Millipore Sigma, Saint Louis, Mo., USA) supplemented with LC-MS Grade Formic Acid (85178, Thermo Fisher Scientific). The following solvents/chemicals were also used: Ethanol (V1001, Decon Labs, King of Prussia, Pa., USA), Methanol (3016-16, Avantor, Center Valley, Pa., USA), dimethyl sulfoxide (DMSO) (32434, Alfa Aesar, Ward Hill, Mass., USA), Imidazole (IX0005, Millipore Sigma, Saint Louis, Mo., USA), sodium chloride (X190, VWR, OH, USA), sodium phosphate monobasic monohydrate (20233, USB Corporation, Cleveland, Ohio, USA), sodium phosphate dibasic anhydrous (204855000, Acros, N.J., USA), guanidine hydrochloride (50950, Millipore Sigma, Saint Louis, Mo., USA), tris (75825, Affymetrix, Cleveland, Ohio, USA), TCEP (51805-45-9, Gold Biotechnology, Saint Louis, Mo., USA), and EDTA (0.5M stock, 15694, USB Corporation, Cleveland, Ohio, USA). DNA oligos and oligo pools were ordered from Integrated DNA Technologies (San Francisco, Calif., USA) and enzymes and peptide plasmids were assembled/cloned in-house or synthesized by Twist Biosciences (San Francisco, Calif., USA). Enzymes and peptides were codon optimized using an in-house optimization tool.

### Peptide Expression and Purification.

[0298] Saturated cultures in LB were diluted 1:100 into 1 ml TB in deep well plates, incubated for 3 hours (Multitron Pro, 30° C., 900 r.p.m.), supplemented with appropriate inducers, and incubated for an additional 20 hours (Multitron Pro, 30° C., 900 r.p.m.). For purification, plates were centrifuged (Legend XFR, 4,500 g, 4° C., 20 min), pellets were resuspended in 850 μl lysis buffer (5 M guanidinium hydrochloride, 300 mM NaCl, 50 mM sodium phosphate, pH 7.5), frozen (liquid nitrogen, −196° C.), thawed (Multitron Pro at 37° C., 900 r.p.m), and clarified via centrifugation (Legend XFR, 4,500 g, 4° C., 40 min). Peptides were affinity purified using His MultiTrap TALON plates (29-0005-96, GE Life Sciences), following manufacturer instructions, using 1×500 μl water and 2×500 μl lysis buffer for column equilibration, 2×500 μl wash buffer (300 mM NaCl, 50 mM sodium phosphate, 5 mM imidazole, pH 7.5), and 1×200 μl elution buffer (300 mM NaCl, 50 mM sodium phosphate, 150 mM imidazole, pH 7.5).

### Liquid Chromatography/Mass Spectrometry.

[0299] All chromatography was performed using mobile phases ACN (acetonitrile supplemented with 0.1% formic acid and 0.1% water) and water (supplemented with 0.1% formic acid). LC-MS was performed on one of two mass spectrometers: “QQQ” is an Agilent 1260 Infinity liquid chromatograph with binary pump configured in low-dwell volume mode, high-performance autosampler chilled to 18° C., and column oven, coupled to an Agilent 6420 QQQ mass spectrometer equipped with an Agilent electrospray ionization (ESI) source; nitrogen gas is supplied by a Parker Nitroflowlab and ESI source parameters are 350° C. gas temp at 12 L/min flow rate, 15 psi nebulizer voltage, 4000 V capillary voltage, 135 V fragmentor voltage, and 7 V cell accelerator voltage. “QTOF” is an Agilent 1260 Infinity II liquid chromatograph with binary pump configured in low-dwell volume mode and column oven set to 40° C., coupled to an Agilent 6545 QTOF mass spectrometer equipped with an Agilent electrospray ionization (ESI) source; nitrogen gas is building supplied and ESI source parameters are 350° C. gas temperature, 12 L/min gas flow, 30 psig nebulizer pressure, 350° C. sheath gas temperature, 8 L/min sheath gas flow, 3000 V capillary voltage, 1000 V nozzle voltage, 135 V fragmentor voltage, 15 V skimmer voltage, 600 V Oct 1 RF Vpp; the mass spectrometer was run in MS mode with reference mass enabled and tuned in positive mode with standard mass range (3200 m/z) and 2 GHz extended dynamic range.

### LCMS Data Analysis and Peak Integration.

[0300] mzXML files were parsed and imported into python to a long-form pandas dataframe and filtered for signals between 1-6 min and 500-2,500 Da. For each extract, the expected molecular weight of unmodified, modified, and partially modified (if applicable) peptides were calculated. For each molecular weight, all charge state [M+xH]^{x+} (x is number of protons/charges) masses were calculated and extracted as an EIC with a mass window of +/−5/x Da for extracts analyzed with “QQQ” and 2/x Da for extracts analyzed with “QTOF”. Charge state EIC intensities were summed together at each timepoint to generate an extracted compound chromatogram (ECC). If present, an ECC peak is fit with a skewed gaussian with parameters peak area, retention time, peak width, and peak skew. Peaks are considered real/trustworthy based on the following criteria: greater than 8 charge states present/observed at the same retention time (+/−0.2 min) with at least 4 being consecutive charge states, only one “large” peak in the ECC (i.e. no peaks greater than 80% of the largest peak height in the chromatogram), and not more than 2 “small” peaks (i.e. <3 peaks greater than 40% of the largest peak height), peak skew between 0 and 1.5, peak width less than or equal to 0.25. Within an extract, “total peptide” is defined as the sum of the peak areas of unmodified, modified, and partially modified (if applicable) peptides if the modification mass shift is >15 Da and is defined as the sum of the peak areas of unmodified and modified peptides otherwise (due to overlapping isotope distributions). Fraction modified is defined as the modified peptide peak area divided by the “total peptide”. Peak integrations and masses for each extract are listed in Supplementary Table 6. All analysis is done in python 3.5 using pandas, scipy, numpy, and matplotlib libraries.

### REFERENCES FOR EXAMPLE 3

[0301] 1. Van Arnam, Chemical Society Reviews, 2018. 47(5): p. 1638-1651
[0302] 2. Vogt, and Künzler, Applied Microbiology and Biotechnology, 2019. 103(14): p. 5567-5581
[0303] 3. Montalbán-López, M., et al., Natural Product Reports, 2021
[0304] 4. Addison, W. N., et al., Biomaterials, 2010. 31(36): p. 9422-9430
[0305] 5. Wallace, A. K., et al. Advanced Functional Materials, 2020. 30(30): p. 2000849
[0306] 6. Morrison, C., Nat Rev Drug Discov, 2018. 17(8): p. 531-533
[0307] 7. Müller, et al. Angewandte Chemie International Edition, 2007. 46(25): p. 4771-4774
[0308] 8. Nicolaou, K. C., et al., Journal of the American Chemical Society, 2005. 127(31): p. 11176-11183.
[0309] 9. Nicolaou, K. C., et al., Journal of the American Chemical Society, 2005. 127(31): p. 11159-11175.
[0310] 10. Gu, and Schmidt, Accounts of Chemical Research, 2017. 50(10): p. 2569-2576.
[0311] 11. Goto, Y. and H. Suga, Curr Opin Chem Biol, 2018. 46: p. 82-90.
[0312] 12. Hudson, G. A. and D. A. Mitchell, Current Opinion in Microbiology, 2018. 45: p. 61-69.
[0313] 13. Lin, G.-M., et al. Current Opinion in Systems Biology, 2019. 14: p. 82-107.
[0314] 14. Chekan, J. R., et al. Proceedings of the National Academy of Sciences, 2019. 116(48): p. 24049-24055.
[0315] 15. Burkhart, B. J., et al., Nature Chemical Biology, 2015. 11(8): p. 564-570.
[0316] 16. Oman, T. J. and W. A. Van Der Donk, Nature Chemical Biology, 2010. 6(1): p. 9-18.
[0317] 17. Morinaka, B. I., et al., Angewandte Chemie International Edition, 2014. 53(32): p. 8503-8507.
[0318] 18. Morinaka, B. I., et al., Science, 2018. 359(6377): p. 779-782.
[0319] 19. Arnison, P. G., et al., Nat. Prod. Rep., 2013. 30(1): p. 108-160.
[0320] 20. Zhang, Z., et al., Journal of the American Chemical Society, 2016. 138(48): p. 15511-15514.
[0321] 21. Crone, W. J. K., et al., Angewandte Chemie International Edition, 2016. 55(33): p. 9639-9643.
[0322] 22. Bhushan, A., et al., Nature Chemistry, 2019. 11(10): p. 931-939.
[0323] 23. Acker, M. G., et al. Journal of the American Chemical Society, 2009. 131(48): p. 17563-17565.
[0324] 24. Bowers, A. A., et al., Journal of the American Chemical Society, 2010. 132(21): p. 7519-7527.
[0325] 25. Bowers, A. A., et al., Journal of the American Chemical Society, 2012. 134(25): p. 10313-10316.
[0326] 26. Tran, H. L., et al., Journal of the American Chemical Society, 2017. 139(7): p. 2541-2544.
[0327] 27. Zhang, F. and W. L. Kelly, ACS Chemical Biology, 2015. 10(4): p. 998-1009.
[0328] 28. Ozaki, T., et al., Nature Communications, 2017. 8(1): p. 14207.
[0329] 29. Fleming, S. R., et al., Journal of the American Chemical Society, 2019. 141(2): p. 758-762.
[0330] 30. Vagstad, A. L., et al., Angewandte Chemie International Edition, 2019. 58(8): p. 2246-2250.
[0331] 31. Deane, C. D., et al., ACS Chemical Biology, 2013. 8(9): p. 1998-2008.
[0332] 32. Rahman, I. R., et al., ACS Chemical Biology, 2020. 15(6): p. 1473-1486.
[0333] 33. Thibodeaux, et al. Journal of the American Chemical Society, 2014. 136(50): p. 17513-17529.
[0334] 34. Goto, Y., et al., Chemistry & Biology, 2014. 21(6): p. 766-774.
[0335] 35. Li, C., et al. Mol. BioSyst., 2011. 7(1): p. 82-90.
[0336] 36. Freeman, M. F., et al., Nature Chemistry, 2017. 9(4): p. 387-395.
[0337] 37. Yu, Y., et al. Protein Science, 2013. 22(11): p. 1478-1489.
[0338] 38. Cubillos-Ruiz, A., et al., Proceedings of the National Academy of Sciences, 2017. 114(27): p. E5424-E5433.
[0339] 39. Sardar, D., et al., ACS Synthetic Biology, 2015. 4(2): p. 167-176.
[0340] 40. Zhang, Q., et al., ACS Chemical Biology, 2014. 9(11): p. 2686-2694.
[0341] 41. Van Der Velden, N. S., et al., Nature Chemical Biology, 2017. 13(8): p. 833-835.
[0342] 42. Ruffner, D. E., et al. ACS Synthetic Biology, 2015. 4(4): p. 482-492.
[0343] 43. Zong, C., et al. ACS Chemical Biology, 2016. 11(1): p. 61-68.
[0344] 44. Mukherjee, S. and W. A. Van Der Donk, Journal of the American Chemical Society, 2014. 136(29): p. 10450-10459.
[0345] 45. Tianero, M. D. B., et al., Journal of the American Chemical Society, 2012. 134(1): p. 418-425.
[0346] 46. Hao, Y., et al., Proceedings of the National Academy of Sciences, 2016. 113(49): p. 14037-14042.
[0347] 47. Vinogradov, A. A., et al., Nature Communications, 2020. 11(1).
[0348] 48. Deane, C. D., et al., ACS Chemical Biology, 2016. 11(8): p. 2232-2243.
[0349] 49. Rink, R., et al., Biochemistry, 2005. 44(24): p. 8873-8882.
[0350] 50. Si, Y., et al., 2020, Cold Spring Harbor Laboratory.
[0351] 51. Mordhorst, S., et al., Angewandte Chemie International Edition, 2020. 59(48): p. 21442-21447.
[0352] 52. Ortega, M. A., et al., ACS Chemical Biology, 2014. 9(8): p. 1718-1725.
[0353] 53. Ding, W., et al., Synth Syst Biotechnol, 2018. 3(3): p. 159-162.
[0354] 54. Kupke, T., et al Journal of Biological Chemistry, 1995. 270(19): p. 11282-11289.
[0355] 55. Zhang, Q. and W. A. Van Der Donk, FEBS Letters, 2012. 586(19): p. 3391-3397.
[0356] 56. Young, S., et al., Chemistry & Biology, 2012. 19(12): p. 1600-1610.
[0357] 57. Donia, S., et al., Chemistry & Biology, 2011. 18(4): p. 508-519.
[0358] 58. Roh, H., et al., ChemBioChem, 2019. 20(8): p. 1051-1059.
[0359] 59. Fleming, S. R., et al., Journal of the American Chemical Society, 2020. 142(11): p. 5024-5028.
[0360] 60. Fuchs, S. W., et al., Angewandte Chemie International Edition, 2016. 55(40): p. 12330-12333.
[0361] 61. Hegemann, J. D., et al., ACS Synthetic Biology, 2019. 8(5): p. 1204-1214.
[0362] 62. Yang, X., et al Nature Chemical Biology, 2018. 14(4): p. 375-380.
[0363] 63. Cotter, P. D., et al., Molecular Microbiology, 2006. 62(3): p. 735-747.
[0364] 64. Schmitt, S., et al., Nature Chemical Biology, 2019. 15(5): p. 437-443.
[0365] 65. Cebrian, R., et al., Design and Expression of Specific Hybrid Lantibiotics Active Against Pathogenic Clostridium spp. Frontiers in Microbiology, 2019. 10.
[0366] 66. Young, T. S., Reviews in Cell Biology and Molecular Medicine.
[0367] 67. Field, D., et al., Molecular Microbiology, 2008. 69(1): p. 218-230.
[0368] 68. Rink, R., et al., Applied and Environmental Microbiology, 2007. 73(18): p. 5809-5816.
[0369] 69. Appleyard, A. N., et al., Chemistry & Biology, 2009. 16(5): p. 490-498.
[0370] 70. Boakes, S., et al., Applied Microbiology and Biotechnology, 2012. 95(6): p. 1509-1517.
[0371] 71. Pan, S. J. and A. J. Link, Journal of the American Chemical Society, 2011. 133(13): p. 5016-5023.
[0372] 72. Urban, J. H., et al., Nature Communications, 2017. 8(1).
[0373] 73. Korneli, M., et al., ACS Synthetic Biology, 2021.
[0374] 74. Burkhart, B. J., et al., ACS Central Science, 2017. 3(6): p. 629-638.
[0375] 75. Huang, C.-F. and M. Mrksich, ACS Combinatorial Science, 2019. 21(11): p. 760-769.
[0376] 76. Sardar, D., et al., Chemistry & Biology, 2015. 22(7): p. 907-916.
[0377] 77. Van Heel, A. J., et al., ACS Synthetic Biology, 2013. 2(7): p. 397-404.
[0378] 78. Ghodge, S. V., et al., Journal of the American Chemical Society, 2016. 138(17): p. 5487-5490.
[0379] 79. Su, Y., et al., Applied Microbiology and Biotechnology, 2019. 103(6): p. 2649-2664.
[0380] 80. Zhu, S., et al., FEBS Letters, 2016. 590(19): p. 3323-3334.
[0381] 81. Zhu, S., et al., J Biol Chem, 2016. 291(26): p. 13662-78.
[0382] 82. Zhang, Y., et al., Frontiers in Microbiology, 2018. 9.
[0383] 83. Sugase, K., et al., Protein Expression and Purification, 2008. 57(2): p. 108-115.
[0384] 84. Meyer, A. J., et al., Nature Chemical Biology, 2019. 15(2): p. 196-204.
[0385] 85. Montalbán-López, M., et al., FEMS Microbiology Reviews, 2017. 41(1): p. 5-18.
[0386] 86. N/A
[0387] 87. Segall-Shapiro, T. H., et al., Nature Biotechnology, 2018. 36(4): p. 352-358.
[0388] 88. Salis, H. M., et al., Nature Biotechnology, 2009. 27(10): p. 946-950.
[0389] 89. Espah Borujeni, A., et al., Nucleic Acids Research, 2014. 42(4): p. 2646-2659.
[0390] 90. Clifton, K. P., et al., Journal of Biological Engineering, 2018. 12(1).
[0391] 91. Michael, J. P., Natural Product Reports, 2007. 24(1): p. 191.
[0392] 92. Walsh, C. T., et al., ACS Chemical Biology, 2012. 7(3): p. 429-442.
[0393] 93. Martins, J. and V. Vasconcelos, Marine Drugs, 2015. 13(11): p. 6910-6946.
[0394] 94. Rosano, G. N. L. and E. A. Ceccarelli, Frontiers in Microbiology, 2014. 5.
[0395] 95. Himes, P. M., et al., ACS Chemical Biology, 2016. 11(6): p. 1737-1744.
[0396] 96. Goodman, K. J. and J. T. Brenna, Analytical Chemistry, 1994. 66(8): p. 1294-1301.
[0397] 97. Zhang, Y., et al., Nature Communications, 2018. 9(1).
[0398] 98. Li, K., et al., Nature Chemical Biology, 2016. 12(11): p. 973-979.
[0399] 99. Kallberg, M., et al., Nature Protocols, 2012. 7(8): p. 1511-1522.
[0400] 100. Bobeica, S. C., et al., eLife, 2019. 8.
[0401] 101. Jones, S. and J. M. Thornton, Progress in Biophysics and Molecular Biology, 1995. 63(1): p. 31-65.
[0402] 102. Koehnke, J., et al., Nature Chemical Biology, 2015. 11(8): p. 558-563.
[0403] 103. Rubin, G. M. and Y. Ding, Journal of Industrial Microbiology & Biotechnology, 2020. 47(9-10): p. 659-674.
[0404] 104. Panavas, et al., Methods in Molecular Biology. 2009, Humana Press. p. 303-317.
[0405] 105. Schnell, N., et al., European Journal of Biochemistry, 1992. 204(1): p. 57-68.
[0406] 106. Schnell, N., et al., Nature, 1988. 333(6170): p. 276-278.
[0407] 107. Sit, C. S., et al., Accounts of Chemical Research, 2011. 44(4): p. 261-268.
[0408] 108. Palm, K., et al., Journal of Medicinal Chemistry, 1998. 41(27): p. 5382-5392.
[0409] 109. Lipinski, C. A., et al., Advanced Drug Delivery Reviews, 2001. 46(1-3): p. 3-26.
[0410] 110. Kaunietis, A., et al., Nature Communications, 2019. 10(1).
[0411] 111. Butler, M. S., et al., The Journal of Antibiotics, 2014. 67(9): p. 631-644.
[0412] 112. Moradi, S. V., et al., Chemical Science, 2016. 7(4): p. 2492-2500.
[0413] 113. Gavrish, E., et al., Chemistry & Biology, 2014. 21(4): p. 509-518.
[0414] 114. Mandal, P. K., et al., Journal of Medicinal Chemistry, 2011. 54(10): p. 3549-3563.
[0415] 115. Kapust, R. B., et al., Biochemical and Biophysical Research Communications, 2002. 294(5): p. 949-955.
[0416] 116. Eng, C. H., et al., Nucleic Acids Research, 2018. 46(D1): p. D509-D515.
[0417] 117. Knappe, T. A., et al., Angewandte Chemie International Edition, 2011. 50(37): p. 8714-8717.
[0418] 118. Kosuri, S. and G. M. Church, Nature Methods, 2014. 11(5): p. 499-507.
[0419] 119. Klucznik, T., et al., Chem, 2018. 4(3): p. 522-532.
[0420] 120. Coley, W., Connor, et al., Chemical Science, 2019. 10(2): p. 370-377.
[0421] 121. Segler, M. H. S., et al., Nature, 2018. 555(7698): p. 604-610.
[0422] 122. Precord, T. W., et al., ACS Chemical Biology, 2019. 14(9): p. 1981-1989.
[0423] 123. Das, S. and S. Chakrabarti, Scientific Reports, 2021. 11(1).
[0424] 124. Tianero, M. D., et al. Proceedings of the National Academy of Sciences, 2016. 113(7): p. 1772-1777.
[0425] 125. Bennallack, P. R. and J. S. Griffitts, World Journal of Microbiology and Biotechnology, 2017. 33(6).
[0426] 126. Hudson, G. A., et al., Journal of the American Chemical Society, 2015. 137(51): p. 16012-16015.
[0427] 127. Sarkar, S., ACS Catalysis, 2020. 10(13): p. 7146-7153.
[0428] 128. Liu, R., et al., Advanced Science, 2020. 7(17): p. 2001616.
[0429] 129. Kloosterman, A. M., et al., mSystems, 2020. 5(5).
[0430] 130. Skinnider, M. A., et al., Proceedings of the National Academy of Sciences, 2016.
[0431] 113(42): p. E6343-E6351.
[0432] 131. Kloosterman, A. M., et al., PLOS Biology, 2020. 18(12): p. e3001026.
[0433] 132. Tietz, J. I., et al., Nature Chemical Biology, 2017. 13(5): p. 470-478.
[0434] 133. Kloosterman, A. M., et al., Current Opinion in Biotechnology, 2021. 69: p. 60-67.
[0435] 134. Blin, K., et al., Nucleic Acids Res, 2019. 47(W1): p. W81-W87.
[0436] 135. Jin, M., et al., Angewandte Chemie International Edition, 2003. 42(25): p. 2898-2901.

### Example 4: Selection for Constrained Peptides that Bind to the SARS-CoV-2 Spike Protein

[0437] Peptide secondary metabolites are common in nature and have diverse functions, from antibiotics to cross-kingdom signaling, that have been harnessed as pharmaceuticals. Their amino acid structure simplifies binding to protein targets and they have constraints and chemical modifications that enhance affinity, stability and solubility. A method to design large libraries of modified peptides in Escherichia coli and screen them in vivo to identify those that bind to a target-of-interest was developed in this Example. Constrained peptide scaffolds were produced using modified enzymes gleaned from microbial RiPP (ribosomally synthesized and post-translationally modified peptides) pathways and diversified to build large libraries. RiPP binding to a target protein leads to the intein-catalyzed release of a 6 factor. This circuit was used to drive a selection, which could evaluate 10⁸ variants in a single experiment. This was applied to the discovery of a 1625 Da constrained peptide (AMK-1057) that binds with 990±5 nM affinity to the SARS-CoV-2 Spike receptor binding domain (RBD), a potential therapeutic target.

### INTRODUCTION

[0438] Bacteria and fungi secrete modified peptides that can act on eukaryotic cells by binding to cell-surface proteins, inhibiting enzymes or affecting protein-protein interactions [1-3]. They can be produced by large non-ribosomal peptide synthases or encoded by genes and post-translationally modified (RiPPs) [4-8]. As pharmaceuticals, cyclic peptides are approved for the treatment of cancer, inflammation, and infection and increasing numbers are entering all phases of clinical development for diverse indications [9-12]. They have shown promise for blocking viral entry into human cells [13,14]. For example, the FDA-approved HIV therapeutic Enfuvirtide is a 36 amino acid (aa) linear peptide that binds to a transmembrane glycoprotein; however, it suffers from rapid proteolysis, thus requiring twice daily injections [15]. Crosslinking HIV-1 mimetic peptides makes them proteolytically-stable, acid-resistant, and orally bioavailable [16].

[0439] Discovering peptides that bind to a therapeutic target requires methods to: (1) create massive pools of chemical diversity, and (2) identify hits in an efficient manner. Synthetic chemistry can be used to create libraries of modified peptides, including cycles and glycosylation, which are screened individually in assays that can be automated [17-24]. Encoding the peptide with its genetic material facilitates the panning for those that bind to a target, for example, using fluorescence activated cell sorting (FACS) [18-20,23, 25-29]. This can be done through yeast display, mRNA-peptide fusions and phage display, which have been used to find modified peptides that are antibiotics or bind human therapeutic targets [26, 29-36]. Cyclization can be performed enzymatically, chemically, or with split inteins, which are naturally occurring proteins that splice two separately-expressed peptides into an excised intein and a product [37,38].

[0440] If target binding can be linked to gene expression, this can be used to drive a reporter for screening or a marker that allows cells to survive a selection. The classic example is a two-hybrid system where a “bait” protein fused to DNA-binding domain recruits the “prey” protein fused to an activator that turns on a promoter when bound [39-44]. This can be used to find molecules that disrupt the bait-prey interaction, which has been applied to the discovery of linear peptides that are antivirals or block cancer signaling or progression [40, 45-47]. An E. coli version led to the discovery of a cyclized RiPP μM inhibitor of the p6-UEV protein-protein interaction necessary for HIV budding [41,44]. Protein-protein interactions have also been detected using split inteins where, upon binding, a reporter (epitope, fluorescent protein or a factor) is released, but this has not been applied to molecular discovery [48,49].

[0441] Infection by severe acute respiratory syndrome coronavirus-2 (SARS-CoV-2), the causative agent of COVID-19, is dependent upon cell recognition and entry mediated by the interaction of viral surface glycoprotein (Spike) receptor binding domain (RBD) and host receptor angiotensin-converting enzyme 2 (ACE2) (FIG. 13A, FIG. 13B) [50-53]. The high affinity of RBD to human ACE2 (44.2 nM) has been suggested to contribute to the contagiousness of SARS-CoV-2 [54]. Serum isolated from convalescent coronavirus patients, used for treatment, contains mixtures of antibodies targeting viral epitopes, with Spike protein being the predominant target neutralized [55,56]. Targeted drug discovery efforts from companies including Astra Zeneca/Vanderbilt University, Celltrion, Eli Lilly/AbCellera, Eli Lilly/Junshi, and Tychan have yielded monoclonal antibodies (>1000 aa) specific to Spike protein in various stages of clinical development [57]. So-called nanobodies (˜100 aa) have been evolved in the laboratory to bind to Spike (with 4.5 nM affinity) [58]. Computational protein design was used to develop a “miniprotein” (56 aa), the best of which bound with sub-nM affinity and neutralized virus at 0.15 nM concentration [59]. A biotinylated 23 aa peptide taken from the N-terminal region of ACE2 binds to the Spike RBD with a KD of 1.3 μM [60]. A cyclic peptide based on the SARS-CoV-2 Mpro C-terminal autolytic cleavage site was shown to have an IC50 of 150 μM for the viral protease, another potential therapeutic target [61].

[0442] A genetic circuit in E. coli that responds when a modified peptide binds to a single bait protein was developed and used to drive a selection to identify hits that bind to the SARS-CoV-2 Spike RBD. Libraries of modified peptides were produced by artificially combining enzymes from microbial RiPP pathway that introduces thioether-based macrocycles to constrain the peptide (Paenibacillus polymyxa PapB) [62-64] and vary the unmodified core residues. Each candidate RiPP was fused to a C-terminal intein and one half of a split a factor (RiPP-Npu^{C}-σ^{C}) and modified in this context (FIG. 13C). The bait (Spike RBD) was fused to the complementary intein and the other half of the σ factor (σ^{N}-Npu^{N}-Bait). In this system, when the modified RiPP binds to the bait, the complete σ factor is released, binds to a promoter and facilitates the expression of a reporter and/or selection marker. Rounds of positive selection were used to identify RiPPs that bound to the bait RBD in the circuit. From these selections, a 14 aa thioether-cyclized peptide (termed AMK-1057) that binds human-derived SARS-CoV-2 Spike RBD with a K_{D} of 990±5 nM was identified.

### Results

### A Genetic Circuit to Detect Modified Peptide Binding to a Target

[0443] The genetic circuit described in this Example converts a binding event into a transcriptional response (e.g., the expression of a reporter protein; FIG. 13C). It is based on two fusion proteins that, upon binding, release a σ factor that recruits RNA polymerase to a promoter, resulting in expression of the reporter downstream of the promoter. Each fusion protein comprises one half of a split intein from Nostoc punctiforme PCC73102 (Npu). The Npu intein was selected because of its stability and rapid splicing kinetics [38]. The σ factor ECF20_992 was chosen based on previous development by the inventors of a split version of it [65,66]. The N-terminus of the fusion protein had the leader peptide that recruits modifying enzymes and the core sequence of the RiPP followed by a flexible 20 aa linker. Successful splicing of full length σ factor resulted in the activation of the P20_992 promoter, thereby turning on the downstream genes (e.g., a reporter gene; FIG. 13C). To develop the sensor, the well-studied interaction between the proteins p53 and Mdm2 was selected as a test case [67]. Specifically, residues 17-124 of Mdm2 (Mdm2*) and a high affinity (K_{D}=0.5 nM) variant of residues 15-29 of p53 (PMI) [68,69] were used as bait and peptide fusions to the σ^{N}-Npu^{N} and Npu^{C}-σ^{C} fragments, respectively. The two genes were placed under the control of the PLuxB and PTac promoters in E. coli Marionette Clone 70 (a derivative of NEB 10β). For characterization, sfGFP was cloned downstream of P20_992 and fluorescence was measured using flow cytometry as a function of the inducers 3O6-AHL and IPTG (FIG. 13D, left panel). The dynamic range between uninduced and fully-induced was 114-fold, and expression varied over orders-of-magnitude while still allowing a response to be observed.

[0444] It is important that the expression of the σ^{N}-Npu^{N} and Npu^{C}-σ^{C} fragments, in the absence of bait or peptide, does not induce the circuit. The experiments described above were repeated for these fragments lacking bait or peptide. At maximal expression of the σ^{N}-Npu^{N} and Npu^{C}-σ^{C} fragments (lacking bait or peptide), the output promoter was activated, albeit at 8-fold lower activity than when the bait and peptide were included (FIG. 13D, right panel). This difference was maximized to >200-fold when σ^{N}-Npu^{N} was fully induced and Npu^{C}-σ^{C} fragment was uninduced (FIG. 13D, right panel). To simplify this implementation, the σ^{N}-Npu^{N}-bait protein was placed under the control of a constitutive promoter. The peptide-Npu^{C}-σ^{C} was kept under 3OC6-AHL control so that its intracellular concentration could be varied during rounds of selection to preferentially select for higher-affinity binders.

[0445] The inducible range of the sensor was then determined when either the bait or peptide were swapped to disrupt the interaction. When a peptide based on the N-terminal residues 19-56 of ACE2 (ACE2*), which does not bind to the Mdm2* target, was used, the fluorescent output of the circuit dropped 15-fold. Similarly, when the target peptide was swapped to be residues 328-533 of the SARS-CoV-2 Spike protein (RBD) 51, to which PMI does not bind, the output dropped 93-fold (FIG. 13F).

[0446] The peptide needs to be able to be modified by RiPP enzymes in the context of its fusion to C-terminal Npu^{C}-σ^{C} (FIG. 13F). The RiPP enzymes were recruited by binding to an N-terminal leader sequence and then modifying the core sequence [4]. Natural RiPPs are proteolytically released from the leader, but for the selections used in this Example, they remain fused because the cognate protease was not co-expressed. Examples have been published where leaders do not interfere with the binding of the core sequence to its target [27,41]. RiPP enzymes often exhibit relaxed substrate specificity for the unmodified core residues [72-74]. In many cases, tags and fusions can be made to the C-terminus without impacting the modification [27,74,75].

[0447] A preliminary experiment was performed to ensure that an enzyme of interest could modify a large fraction of core sequences in a library without being impacted by the C-terminal fusion (FIG. 13G). The PapA/PapB peptide/enzyme pair from the Paenibacillus polymyxa freyrasin biosynthetic gene cluster was selected as a test case [63]. PapB introduces a thioether macrocycle between core C and D/E residues and was shown to be tolerant to amino acid diversity at the unmodified residues [63,73]. Based on this system, a simplified core and leader peptide containing two cycles was designed (FIG. 13H). A library was constructed allowing full (NNK) degeneracy at 9 unconserved amino acid positions and D/E at the two macrocyclized positions, resulting in 10¹² theoretical diversity. Nineteen random members from this library were selected, co-expressed with PapB, and evaluated for cyclization by measurement of the mass shift observed using LCMS. Of the original set, 14 were the proper core peptide (1 frame shift) and could be observed by LC-MS, and of these 36% were modified correctly. Thus, a large fraction of a highly diverse library contained the expected modification. The modification did not seem to bias the core amino acid content for the small set analyzed (FIG. 13I, FIG. 13J).

### Selection System for Finding SARS-CoV-2 Spike RBD Binders

[0448] The genetic system used for the selections, involving nine genes, is shown in FIG. 14A. It has been previously demonstrated that the SARS-CoV-2 Spike RBD can be expressed in E. coli and, despite the protein being non-glycosylated, a similar antibody binding profile to that produced from human cells results [76,77]. This domain was used to build σ^{N}-npu^{N}-RBD, which was placed under the control of the weak J23105 constitutive promoter. The peptide library was inserted into the RiPP-npu^{C}-σ^{C} gene and controlled with 3OC6-AHL. The modifying enzyme was placed under the control of the cumate-inducible promoter. When the a factor is released, the P20_992 promoter drives the expression of an operon containing a fluorescent protein selectable marker fusion sfGFP-cat. This enabled positive selection by the addition of chloramphenicol (Cm) to the media.

[0449] The libraries of modified peptides were constructed using oligo synthesis with NNK codons at the varied residues and cloned into a low copy pSC101 plasmid. The library was transformed using electrocompetence, which was found to limit the library size to 10⁸ per transformation. Then, multiple rounds of positive selection were performed. The details for each library are described further below. When a RiPP binds the target, expression of Cat is increased, thereby conferring chloramphenicol resistance to the host cell (FIG. 14B). Over rounds of positive selection, increased stringency can be applied by increasing the concentration of Cm or decreasing peptide induction with 3OC6-AHL (FIG. 14C).

### Library Design and Selection

[0450] The library was based on the simplified PapB-modified core structure shown in FIG. 14D which produces 13 aa cyclized peptides. After transformation, rounds of positive selection were performed, after which the surviving plasmids were isolated and retransformed after each round (FIG. 14C). Cells were grown overnight in increasing concentrations of Cm: Round 1 (300 μM), Round 2 (800 μM) and Round 3 (1200 μM). sfGFP expression was measured after each round using flow cytometry, showing a continuous increase in the fluorescence after each round of selection (FIG. 14E). Notably, when using 300 μM Cm for the initial selection, two peaks were observed: one lower (˜2,000 AU) and much higher (˜10,000 AU). This higher peak was attributed to escape mutants from the selection plasmid breaking. To eliminate escapes from round to round, non-peptide plasmid was digested and re-transformed into the expression strain, eliminating the peak corresponding to escapes (FIG. 14E). All selection rounds were then analyzed using next-generation sequencing (NGS). The number of unique RiPP sequences decreased after each round, indicating enrichment: 139,320 (Round 1), 88,229 (Round 2) and 63,344 (Round 3). The abundance of each sequence was calculated and 32 were found to represent >1% of the population each after Round 3. These were further reduced to 20 by only considering those that showed consistent enrichment from Round 1 to 2 and from Round 2 to 3.

[0451] The 20 hits from this library were codon optimized, re-synthesized and cloned into the RiPP-npu^{C}-σ^{C} plasmid and re-assessed in freshly transformed cells. Testing of newly synthesized constructs was intended to eliminate any cheater behavior that may have arisen throughout the selection process. These constructs were transformed into selection strains containing cognate modifying enzymes and either Spike RBD or Mdm2* as bait, with the latter intended to measure off-target binding. The circuit output was measured using flow cytometry under the same growth conditions and inducer concentrations used for the selections. The core sequence VCKYGEWCEIVEI (SEQ ID NO: 24) demonstrated a strong transcriptional output and 14-fold specificity for the Spike RBD as bait over Mdm2* (FIG. 14F).

### AMK-1057 Binds Human Cell-Derived SARS-CoV-2 RBD

[0452] The core sequence VCKYGEWCEIVEI (SEQ ID NO: 24) underwent liter-scale production, cleavage and purification (FIG. 15A). The peptide gene was cloned as a C-terminal fusion to a hexa-histidine-Small Ubiquitin-like Modifier (SUMO) tag under control of the PT5LacO promoter and strong ribosome binding site (no longer in the context of the Npu^{C}-σ^{C} fragment). SUMO is a small (12 kDa) tag often used in heterologous protein purification that has been found to be effective in stabilizing RiPP peptide expression while not interfering with modifying enzyme activity [78]. A Tobacco etch virus (TEV) cleavage site was added between the leader and core regions for downstream processing. This left a glycine on the N-terminus of the pap2c_1 peptide, thus producing a 14 aa peptide that, in its modified form, was named AMK-1057. Note there is also a TEV site upstream of the leader sequence, liberating it from SUMO as well so that it can be used as a control.

[0453] Co-expression of this peptide fusion with PapB in E. coli Marionette X (NEB Express derivative) cells followed by Ni-NTA affinity purification yielded tagged and modified pap2c_1. A peak corresponding to unmodified peptide was also detected. Dialysis of Ni-NTA purified peptide, TEV cleavage, solid phase extraction (SPE) and semiprep HPLC purification led to the isolation of three peptides: leader (yield: 200 μg/L), unmodified core (640 μg/L) and modified core (360 μg/L).

[0454] High resolution LCMS analysis of both modified (expected m/z: 1625.7338; observed m/z: 1625.7332) and unmodified (expected m/z: 1627.7494; observed m/z: 1627.7484) peptide showed a mass shift corresponding to formation of a single cycle, despite the library being based on a two-cycle scaffold (FIG. 15B). The macrocycle found in AMK-1057 is formed through the covalent linkage of a side chain cysteine sulfur atom to the CP on the downstream glutamate residue, a linkage that is stable to standard collision-induced dissociation conditions [63]. This property was used to annotate the macrocycle placement via high-resolution tandem MS (HR-MS/MS) and hypothetical structure enumeration and evaluation (FIG. 15C) [79]. Fragmentation analysis indicated that the macrocycle forms at the C-terminal end of AMK-1057, between C9 and E13 (FIG. 15D).

[0455] In vitro binding experiments were then performed using Expi293F human cell-derived and purified RBD. Bio-layer interferometry (BLI) was used to measure the affinity of AMK-1057 to Spike RBD as 990±5 nM (FIG. 15E). Neither the purified unmodified core peptide (FIG. 15F) nor the leader sequence (not shown) showed any binding to the target.

### DISCUSSION

[0456] This Example demonstrates a technique to capture modified peptides that bind to a single target protein. There are several advantages over a two-hybrid screen, including that the binding target does not have to be known (or be a protein) or able to be expressed in a heterologous host, and hits will not be discovered against the “wrong” target (in this case, to human ACE2). As a relevant example of the importance of this capability, clinically relevant betacoronaviruses to date share a common Spike protein for host recognition, but the host receptor is not known a priori [50]. This allows for the search for binders to begin before their cellular targets have been fully elucidated. The libraries provided in this Example are based on natural products built with RiPP enzymes, a family that has been rapidly growing and for which there are many interesting chemical conversions, including halogenation, backbone N-methylation, and β-amino acid formation [80-82]. Larger biologics, such as antibodies, can have problems with stability and are limited in possible modes of delivery [59]. In contrast, cyclic peptides can exhibit improved stability, be cell-permeable thereby enabling access to intracellular antiviral targets, and be suitable for administration via inhalation [83-86].

[0457] Using this approach, a small peptide binder to SARS-Cov Spike RBD was identified. At ˜1600 Da, AMK-1057 is a size that is common for peptide secondary metabolites and approaches the threshold for the commonly used definition of a small molecule (˜900 Da) [9]. At <1 μM binding, AMK-1057 is in the higher range of natural RiPPs binding to their target (e.g., lassomycin at 0.41 μM, microcin J25 at 2 μM) and some peptidic drugs (e.g., vancomycin at ˜1 μM) [87-89]. As the first hit to emerge from a selection, it is ripe for further optimization through additional diversification and medicinal chemistry. This work represents a critical initial step of drug discovery. Putative therapeutics targeting viral fusion need to progressively tested in assays for the blockage of viral entry into cell lines [90-93], followed by animal models [92,93]. A human organ-chip has also been developed to screen repurposed drug compound collections that inhibit viral pseudoparticles expressing SARS-CoV-2 Spike from infecting human lung epithelial cells [94]. Combining molecular diversity creation using the method provided herein with a selection circuit in the same cell enables massive libraries to be evaluated to populate these pharmaceutical discovery pipelines with binders to a target-of-interest with minimal biochemical information.

### Materials and Methods

### Strains, Media, and Chemicals.

[0458] E. coli NEB 10-beta (C3019I, New England BioLabs, Ipswich, Mass., USA) was used for all routine cloning. E. coli Marionette-Clo 70 was used for all selection experiments. E. coli Marionette-X, a Marionette-compatible derivative of NEB Express (C2523I, New England BioLabs, Ipswich, Mass., USA) was used for large-scale peptide expression experiments. TB (T0311, Teknova, Hollister, Calif., USA) supplemented with 0.4% glycerol (BDH1172-4LP, VWR, OH, USA) was used for peptide expression and modification. 2xYT liquid media (B244020, BD, Franklin Lakes, N.J., USA) and 2xYT+2% agar (B214010, BD, Franklin Lakes, N.J., USA) plates were used for routine cloning and strain maintenance. SOB liquid media (S0210, Teknova, Hollister, Calif., USA) was used for making competent cells. SOC liquid media (B9020S, New England BioLabs, Ipswich, Mass., USA) was used for outgrowth. Unless noted otherwise, cells were induced with the following chemicals: cuminic acid (268402, Millipore Sigma, Saint Louis, Mo., USA) added as 1000× stock (200 mM) in EtOH or DMSO; 3-oxohexanoyl-homoserine lactone (3OC6-AHL) (K3007, Millipore Sigma, Saint Louis, Mo., USA) added as a 1000× stock (1 mM) in DMSO; anhydrotetracycline (aTc) (37919, Millipore Sigma, Saint Louis, Mo., USA) added as a 1000× stock (100 PM) in DMSO; isopropyl β-D-1-thiogalactopyranoside (IPTG) (I2481C, Gold Biotechnology, Saint Louis, Mo., USA) added as 1000× stock (1 M) in water. Cells were selected with the following antibiotics: carbenicillin (carb, C-103-5, Gold Biotechnology, Saint Louis, Mo., USA) added as 1000× stock (100 mg/mL in H2O); kanamycin (kan, K-120-10, Gold Biotechnology, Saint Louis, Mo., USA) as 1000× stock (50 mg/mL in H2O); spectinomycin (spec, S-140-5, Gold Biotechnology, Saint Louis, Mo., USA); and chloramphenicol (Cm, C-105-5, Gold Biotechnology, Saint Louis, Mo., USA). Liquid chromatography was performed with Optima Acetonitrile (A996-4, Thermo Fisher Scientific, MA, USA) and water (Milli-Q Advantage A10, Millipore Sigma, Saint Louis, Mo., USA) supplemented with LCMS Grade Formic Acid (85178, Thermo Fisher Scientific). The following solvents/chemicals were also used: Ethanol (V1001, Decon Labs, King of Prussia, Pa., USA), Methanol (3016-16, Avantor, Center Valley, Pa., USA), Ammonium bicarbonate (A6141 Millipore Sigma, Saint Louis, Mo., USA), dimethyl sulfoxide (DMSO) (32434, Alfa Aesar, Ward Hill, Mass., USA), Imidazole (IX0005, Millipore Sigma, Saint Louis, Mo., USA), sodium chloride (X190, VWR, OH, USA), sodium phosphate monobasic monohydrate (20233, USB Corporation, Cleveland, Ohio, USA), sodium phosphate dibasic anhydrous (204855000, Acros, N.J., USA), guanidine hydrochloride (50950, Millipore Sigma, Saint Louis, Mo., USA), tris (75825, Affymetrix, Cleveland, Ohio, USA), TCEP (51805-45-9, Gold Biotechnology, Saint Louis, Mo., USA), and EDTA (0.5M stock, 15694, USB Corporation, Cleveland, Ohio, USA). DNA oligos and gBlocks were ordered from Integrated DNA Technologies (IDT) (San Francisco, Calif., USA).

### Plasmids and Genes.

[0459] Plasmids pTHSS-1282 and pAMK-267 were constructed from the parental pTHSS-1193 backbone, which has a pSC101 origin variant (var 2) and ampicillin resistance [95]. Plasmids pTHSS-1282 and pAMK-267 contain a flexible linker sequence (GSSRGGKGGPGGRGGVGGGGGIGG (SEQ ID NO: 113)) between the peptide/sfGFP and NpuC regions. Plasmids pAMK-925, pTHSS-2132, pAMK-866, and pAMK-870, were constructed from the parental pTHSS-1458 backbone, which has a colE1* origin variant and a kanamycin resistance marker [95]. All plasmids carrying modifying enzymes were constructed from the parental pEG01_189 backbone and contain a p15A origin of replication and spectinomycin resistance [78]. The parental backbone pTHSS-2012, which has a p15a origin and spectinomycin resistance was used for additional cloning experiments [95]. The plasmid pTHSS-1282 that contains the P20_992 promoter expressing sfGFP was constructed from pTHSS-1193. The plasmids pAMK-926 and pTHSS-2137 that contain the PLux promoter expressing Npu^{C}-σ^{C} and PMI-Npu^{C}-σ^{C}, respectively, were constructed from pTHSS-2012. The plasmids pAMK-925 and pTHSS-2132 that contain the PTac promoter expressing σ^{N}-Npu^{N} and residues 17-124 of Mdm2 (Mdm2*)-σ^{N}-Npu^{N}, respectively, were constructed from pTHSS-1458. The plasmid pAMK-870 that contains the constitutive PJ23105 promoter expressing Mdm2*-σ^{N}-Npu^{N} and the P20_992 promoter expressing CAT-sfGFP was constructed from pTHSS-1458. The plasmid pAMK-866 that contains the constitutive PJ23105 promoter expressing 328-533 of the SARS-CoV-2 Spike protein (RBD)-σ^{N}-Npu^{N} and the P20_992 promoter expressing CAT-sfGFP was constructed from pTHSS-1458. The peptide cloning plasmid pAMK-267, constructed from pTHSS-1193, contains the PLux promoter upstream of an RBS-His tag-SapI-sfGFP-SapI-Npu^{C}-σ^{C} where the sfGFP gene can be replaced by a peptide gene through Type IIs assembly methods using the enzyme SapI (NEB). The RBS from pAMK-267 was chosen from a library of RBS variants upstream of a His tag-PMI-Npu^{C}-σ^{C} that was tuned for co-expression with constructs containing the PJ23105 promoter expressing Mdm2*-σ^{N}-Npu^{N}. The N-terminal His tag in pAMK-267 was left in place to provide a constant 11 aa for consistent levels of expression between different peptide sequences. The plasmid pAMK-670 that contains the PLux promoter expressing PMI-Npu^{C}-σ^{C} was constructed from pAMK-267. The plasmid pAMK-857 that contains the PLux promoter expressing N-terminal residues 19-56 of ACE2 (ACE2*)-Npu^{C}-σ^{C} was constructed from pAMK-267. The pTHSS-1193 and pTHSS-1458 backbones have origin variants that alter their copy numbers, making them approximately equivalent to a p15a backbone. Genes encoding Npu intein, PMI, Mdm2*, ACE2*, and RBD were synthesized as gBlocks. The ECF20_992 gene was sourced from a previous publication [65].

### Cytometry Analysis.

[0460] Fluorescence characterization was performed on a BD LSR Fortessa flow cytometer with HTS attachment (BD, Franklin Lakes, N.J., USA). Samples were prepared by diluting overnight cultures 1:400 by adding 0.5 μl of cell culture into 200 μl of PBS containing 1 mg/mL Kan. All samples were run in standard mode at a flow rate of 0.5 μl/s. Fluorescence measurements were made using the blue (488 nm) laser and all data was derived from the FITC-A channel (PMT voltage of 400 V). The FSC and SSC voltages were 650 V and 270 V, respectively. At least 30,000 events were collected for each sample and the Cytoflow Python package was used for downstream analysis. Gating was completed by fitting a 2D Gaussian function to the FSC and SSC distributions and excluding all events greater than three standard deviations from the mean. When presented, the median value is used.

### Evaluation of the Split-Intein σ Factor Circuit.

[0461] Strains of E. coli Marionette Clo harboring a combination of plasmids pTHSS-1282, pTHSS-2132, and pTHSS-2137 or pTHSS-1282, pAMK-925, and pAMK-926 were used for assessing intein splicing with or without PMI-Mdm2* induced association, respectively. Strains were grown in 1 mL of LB+ antibiotics for 20 hr in a deep well 96-well plate (1896-2000, USA Scientific, FL, USA) at 30° C., 900 rpm in an Infors HT Multitron Pro (Infors USA, MD, USA). Cultures were then diluted 1:100 into fresh 1 mL of LB+ antibiotics and serial 1:10 dilutions of inducers (IPTG, 10⁻³-10³ μM; 3O6-AHL, 10⁻³-10³ nM) for 20 hr in a deep well 96-well plate at 30° C., 900 rpm in the Multitron Pro. 0.5 μl of saturated cell culture were then diluted into 200 μl of PBS containing 1 mg/mL kan for cytometry analysis.

### Two-Hybrid Assay for RBD/Mdm2* Association.

[0462] To assay for protein-protein mediated splicing the following plasmid combinations were transformed into E. coli Marionette Clo and fluorescence was measured via cytometry: pAMK-866/pAMK-670 (RBD/PMI); pAMK-866/pAMK-857 (RBD/ACE2*); pAMK-870/pAMK-670 (Mdm2*/PMI); pAMK-870/pAMK-857 (Mdm2*/ACE2*). Strains were grown in 1 mL of LB+ antibiotics for 20 hr in a deep well 96-well plate at 30° C., 900 rpm in a Multitron Pro. Cultures were then diluted 1:100 into fresh 1 mL of LB+ antibiotics+1 μM 3O6-AHL (full induction of peptide plasmid) for 20 hr in a deep well 96-well plate at 30° C., 900 rpm in the Multitron Pro. 0.5 μl of saturated cell culture were then diluted into 200 μl of PBS containing 1 mg/mL Kan for cytometry analysis.

### Library Generation.

[0463] The Pap library was designed with diversity at the ends and middle of the peptide and included either glutamate or aspartate as a cyclization partner, for a final sequence design of “XCXXX[D/E]XCXXX[D/E]X (SEQ ID NO: 114)”. Using the degenerate nucleotide sequences “NNK” to encode any amino acid and “GAW” for aspartate or glutamate, a library of 10¹² peptides encoded by 10¹⁴ unique codon sequences was generated. The library of plasmids lbAMK-103, which contains the PLux promoter expressing the Pap library-Npu^{C}-σ^{C} was constructed from pAMK-267. The pap library was amplified from pEG03_283 using degenerate oligonucleotides oAMK-915/916 (IDT). Gel purification was used to isolate the 124 bp amplicon, which was then cloned into pAMK-267 using the type IIS restriction enzyme SapI (NEB).

[0464] Linear insert and plasmid were mixed at a 1:1 molar ratio (200 fmol each) along with 10 μl 1×DNA ligase buffer, 2 μl T4 DNA ligase (HC) (20 U/μl) (M1794, Promega, Madison, Wis., USA) and 4 μl SapI in 100 μl total volume. Reactions were cycled 25 times for 2 min at 37° C. and 5 min at 16° C. then incubated for 30 min at 50° C., 30 min at 37° C., and 10 min at 80° C. in a DNA Engine cycler (Bio-Rad, Hercules, Calif., USA). An additional 2 μl SapI was then added, and the assembly was incubated for 1 h at 37° C. Assemblies were then purified using Zymo Spin I columns (Zymo Research, Irvine, Calif., USA). Library assemblies were initially transformed into electrocompetent NEB 10βE. coli (C3020K, NEB, Ipswich, Mass., USA). 1.5×10⁷ colony forming units (CFU)/mL were observed for lbAMK-103. Total transformants were estimated by colony counting after 10⁷-fold dilution and plating of liquid outgrowths on selective media.

### Calculation of the Modified Fraction of the Library.

[0465] The initial, unselected papA library was transformed and plated to resolve individual colonies. A set of 19 random colonies were picked and sequenced via colony PCR. Of the 19 sequenced colonies, 18 were properly assembled. These 18 library members were then assessed for post-translational modification via LCMS. The 9 unmodified and 5 modified library sequences were then aligned and WebLogos generated (weblogo.berkeley.edu/logo.cgi) with default parameters, except without small sample correction.

Selection of Pap Library lbAMK-103.

[0466] Assembled library of plasmids lbAMK-103 was transformed into an electrocompetent Marionette Clo strain harboring the PapB modifying enzyme plasmid, pEG06_044, and the selection plasmid, pAMK-866 (all non-assembly transformation steps were >1×10⁸ efficiency). A 1 mL of liquid outgrowth of library transformants was diluted 1:50 in TB+Carb/Kan/Spec+1 μM 3OC6-AHL and 100 μM cumate to induce peptide+modifying enzyme, and grown at 30° C., 250 r.p.m. for 20 h. For the first round of selection, cultures were then diluted 1:100 in TB Carb/Kan/Spec+1 μM 3OC6-AHL and 100 μM cumate+300 μM Cm and grown at 30° C., 250 r.p.m. for at least 20 h (until cultures were saturated). A 0.5 μL aliquot of was taken for cytometry analysis and 2 mL of culture was also taken to harvest plasmid. A 5 μL sample of purified plasmid was stored for NGS analysis and the rest was digested with 1 μL SapI (NEB) for 1 hour at 37° C. to remove the background pEG06_044/pAMK-866 plasmid. The selected lbAMK-103 plasmid was then re-transformed into the strain of electrocompetent E. coli Marionette Clo strain harboring the PapB modifying enzyme, pEG06_046, and the selection plasmid, pAMK-866. The selection process was repeated once more with a Cm concentration of 800 μM and then once more with a Cm concentration of 1200 μM.

### Ngs Analysis.

[0467] Library construction for NGS was performed using the protocol for “KAPA Hyper Prep Kits with PCR Library Amplification/Illumina series” (KK8504, Roche). First, miniprepped library plasmids were amplified with Q5 polymerase (#M0492L, New England BioLabs, Ipswich, Mass., USA) with the primers oAMK-946/947 (Pap library) and oAMK-997/998 (Tgn/Lyn library). A 150 bp band was isolated via gel extraction. Indexed adapters were ligated and reamplified with 10 cycles of PCR. Gel extraction was then used to isolate the resultant 260 bp PCR product. Sample concentrations were calculated using a BioAnalyzer on a High Sense DNA chip (5067-4626, Agilent). Samples were diluted to 2 nM, denatured, and further diluted to 10 μM, with a 10% phiX spike in. Samples were run on a HiSeq 2500 using HiSeq v2 reagents for Paired End Clustering and a 200 cycle SBS kit (PE-402-4002 and FC-402-4021, Illumina). Forward and reverse reads were both 110 cycles, with an 8-cycle single index read. Base-calling and demultiplexing were performed using the bcl2fastq software (Illumina) with default settings. After basecalling and indexing, sequences were identified and aligned using the leader sequence and then binned by sequence.

[0468] Validation of sequences from NGS. Hit peptides from NGS were resynthesized as gBlocks (IDT). These gBlocks were used as template for PCR to introduce SapI restriction sites compatible for re-cloning into the pAMK-267 library backbone. Newly reconstructed library members were transformed into Marionette-Clo cells containing modifying enzyme and selection plasmids and were then plated on media containing Carb/Kan/Spec. Individual transformants were then cultured in TB+Carb/Kan/Spec in a deep well 96-well plate (1896-2000, USA Scientific, FL, USA) and incubated overnight (Multitron Pro, 30° C., 900 rpm). These cultures were then subcultured 1:100 in TB+Carb/Kan/Spec either fully induced (1 μM 3OC6-AHL, and 100 μM cumate) or uninduced and incubated for 20 hr (Multitron Pro, 30° C., 900 rpm) before taking 0.5 μL for standard flow cytometry analysis.

### Peptide Purification.

[0469] Potential peptide hit gBlocks were cloned into the peptide expression plasmid, pEG03-119 78 using their flanking SapI restriction sites. The peptide and modifying enzyme plasmids were co-transformed into E. coli Marionette-X, streaked onto 2xYT agar with carb/spec and incubated at 30° C. overnight. Individual colonies were used to inoculate 20 mL of LB in a 125 mL shake flask and incubated overnight at 30° C. and 250 rpm in an Innova44 (Eppendorf, N.Y., USA). A 5 mL aliquot of overnight starter culture was diluted in 500 mL total volume TB with carb/spec in Fernbach flasks and grown at 30° C. and 250 rpm until reaching OD600 of 0.8-1.0, at which point 1 mM IPTG and 200 μM cumate were added. Induced cultures were grown for a further 20 h at 30° C. and 250 rpm and then centrifuged (4,000 g, 4° C., 10 min) in a Sorvall RC 6+ centrifuge (Thermo Fisher Scientific, MA, USA). Pellets were resuspended in 30 mL lysis buffer (5 M guanidinium hydrochloride, 300 mM NaCl, 10 mM imidazole, 50 mM sodium phosphate, pH 7.5), and freeze-thawed twice (frozen in −80° C. freezer; thawed in innova44 incubator at 30° C., 250 rpm). Cell lysates were centrifuged (Eppendorf 5424, 20,000 g, 18° C., 45 min) in a Sorvall RC 6+ centrifuge (Thermo Fisher Scientific, MA, USA) and the peptides affinity purified via gravity-flow using 3 mL resin-bed volume of Ni-NTA agarose resin (88223, Thermo Fisher Scientific, MA, USA), following manufacturer instructions, using 2 resin-bed volumes water and lysis buffer for column equilibration, 4 resin-bed volumes of wash buffer (5 M guanidinium hydrochloride, 300 mM NaCl, 25 mM imidazole, 50 mM sodium phosphate, pH 7.5), 4 resin-bed volumes of elution buffer (5 M guanidinium hydrochloride, 300 mM NaCl, 250 mM imidazole, 50 mM sodium phosphate, pH 7.5). Eluate from Ni-NTA purification was then subjected to solid-phase extraction (SPE) using Strata-XL 500 mg tubes (8B-S043-HCH, Phenomenex, CA, USA). The solid phase was first conditioned with 4 bed volumes of methanol and then water. Eluate was then loaded, washed with 8 bed volumes of 10 mM NH₄CO₃, and eluted with 8 bed volumes of 1:1 acetonitrile:aqueous 10 mM NH₄CO₃. Solvent was removed via lyophilization at −80 C for 24-48 hours. To cleave the SUMO and leader peptide from the core, the extracted peptide was resuspended in 20 mL TE buffer and 100 μl of 20 mg/mL TEV protease and incubated overnight at room temperature with slow orbital shaking. The cleaved peptides were then desalted using a Strata-X PRO 500 mg SPE tubes (8B-S536-HCH, Phenomenex, CA, USA). The solid phase was first conditioned with 4 bed volumes of methanol and then water. Eluate was then loaded, washed with 8 bed volumes of 10 mM NH₄CO₃, and eluted with 8 bed volumes of 1:1 acetonitrile:aqueous 10 mM NH₄CO₃. Solvent was removed via lyophilization at −80 C for 24-48 hours. After solvent removal, a 5 mL aliquot of the mixture resuspended in 10:90 acetonitrile:water was injected into a Agilent Technologies 1260 Infinity system HPLC (Agilent Technologies, Santa Clara, Calif.) and separated using a 150 mm×10 cm Aeris PEPTIDE XB-C18 column (100 Å, 5 μm) at a flow rate of 2 mL/min. Separation was carried out with a gradient program, with 0.1% formic acid as solvent A and acetonitrile with 0.1% formic acid as solvent B. The % B was held at 25% for 3 minutes, then increased to 50% over the next 17 minutes. The eluent was passed through a diode array detector (DAD) and absorbance at 270 nm was recorded. Detected peaks were collected using an Agilent G1364B Fraction Collector and again solvent was removed via lyophilization at −80 C for 24-48 hours. Samples were resuspended in 1 mL of 1:1 acetonitrile:aqueous 10 mM NH₄CO₃ in pre-weighed 2 mL microcentrifuge tubes (Eppendorf) and solvent was removed via lyophilization at −80 C for 24-48 hours. Yields were measured by comparing mass of empty tubes to tubes containing lyophilized powder.

### Liquid Chromatography/Mass Spectrometry.

[0470] All chromatography was performed using the mobile phases ACN (acetonitrile supplemented with 0.1% formic acid and 0.1% water) and water (supplemented with 0.1% formic acid). The “QTOF” was an Agilent 1260 Infinity II liquid chromatograph with binary pump configured in low-dwell volume mode and column oven set to 40° C., coupled to an Agilent 6545 QTOF mass spectrometer equipped with an Agilent electrospray ionization (ESI) source. ESI source parameters are 350° C. gas temperature, 12 L/min gas flow, 30 psig nebulizer pressure, 350° C. sheath gas temperature, 8 L/min sheath gas flow, 3000 V capillary voltage, 1000 V nozzle voltage, 135 V fragmentor voltage, 15 V skimmer voltage, 600 V Oct 1 RF Vpp; the mass spectrometer was run in MS mode with reference mass enabled and tuned in positive mode with standard mass range (3200 m/z) and 2 GHz extended dynamic range. QTOF analysis was performed with a Phenomenex Aeris PEPTIDE XB-C18 2.6 μm 50 mm×2.1 mm column. The flow rate was set at 0.5 mL/min and 5 μl sample was injected. The gradient used was 20% ACN for 0.5 min, 20% to 55% ACN over 5.5 min, 55% to 90% ACN over 0.5 minutes, 90% ACN for 1.5 min, with 0.8 min re-equilibration. Accurate mass predictions of peptides were generated using the online resource, ChemCalc [96].

### Bio-Layer Interferometry.

[0471] Assays were performed on an Octet Red (ForteBio) instrument at 30° C. with shaking at 1,000 rpm. Ni-NTA biosensors (18-5101, ForteBio, Bohemia, N.Y., USA) were hydrated in 1× kinetics buffer (diluted from 10× buffer; 18-5032, ForteBio, Bohemia, N.Y., USA) for 30 min before the measurement. Expi293F human cell-derived and purified SARS-CoV-2 RBD (RBD296-531) was loaded at 10-20 μg/mL in 1× Kinetics Buffer for 300 s prior to baseline equilibration for 180 s in 1× kinetics buffer. Association reactions of the peptide to RBD296-531 were carried out in 1× kinetics buffer at various concentrations in a two-fold dilution series from 80 mM to 1.25 mM was carried out for 900 s. Then dissociation reactions were observed for 900 s. Response data were generated using ForteBio data analysis software.

### REFERENCES FOR EXAMPLE 4

[0472] 1 Zhang, H. et al. Eur. J. Med. Chem. 156, 847-860, doi:10.1016/j.ejmech.2018.07.023 (2018).
[0473] 2 Okino, T., et al., Tetrahedron 51, 10679-10686, doi:10.1016/0040-4020(95) 00645-0 (1995).
[0474] 3 Schreiber, S. L. & Crabtree, G. R. Immunol. Today 13, 136-142, doi:10.1016/0167-5699(92) 90111-J (1992).
[0475] 4 Arnison, P. G. et al. Nat. Prod. Rep. 30, 108-160, doi:10.1039/C2NP20085F (2013).
[0476] 5 Fischbach, M. A. & Walsh, C. T. Chem. Rev. 106, 3468-3496, doi:10.1021/cr0503097 (2006).
[0477] 6 Whitty, A. et al. Drug Discov. Today 21, 712-717, doi:10.1016/j.drudis.2016.02.005 (2016).
[0478] 7 Villar, E. A. et al. Nat. Chem. Biol. 10, 723-731, doi:10.1038/nchembio.1584 (2014).
[0479] 8 Ermert, P., et al., Methods Mol. Biol. 2001, 147-202, doi:10.1007/978-1-4939-9504-2_9 (2019).
[0480] 9 Luther, A., et al., Curr. Opin. Chem. Biol. 38, 45-51, doi:10.1016/j.cbpa.2017.02.004 (2017).
[0481] 10 Giordanetto, F. & Kihlberg, J., J Med Chem 57, 278-295, doi:10.1021/jm400887j (2014).
[0482] 11 Morrison, C. Nat. Rev. Drug Discov. 17, 531-533, doi:10.1038/nrd.2018.125 (2018).
[0483] 12 Newman, D. J. & Cragg, G. M. J Nat Prod 83, 770-803, doi:10.1021/acs.jnatprod.9b01285 (2020).
[0484] 13 LaBonte, J., et al., Nat. Rev. Drug Discov. 2, 345-346, doi:10.1038/nrd1091 (2003).
[0485] 14 Petersen, J. et al. Nat Biotechnol 26, 335-341, doi:10.1038/nbt1389 (2008).
[0486] 15 Kilby, J. M. et al. Nat. Med. 4, 1302-1307, doi:10.1038/3293 (1998).
[0487] 16 Bird, G. H. et al. Proc. Natl. Acad. Sci. U.S.A 107, 14093-14098, doi:10.1073/pnas.1002713107 (2010).
[0488] 17 Ng, S. & Derda, R. Organic and Biomolecular Chemistry 14, 5539-5545, doi:10.1039/c5ob02646f (2016).
[0489] 18 Wang, X. S. et al. Angewandte Chemie International Edition 58, 15904-15909, doi:10.1002/anie.201908713 (2019).
[0490] 19 Kale, S. S. et al. Nature Chemistry 10, 715-723, doi:10.1038/s41557-018-0042-7 (2018).
[0491] 20 Guillen Schlippe, Y. V., et al., Journal of the American Chemical Society 134, 10469-10477, doi:10.1021/ja301017y (2012).
[0492] 21 Hofmann, F. T., et al., J. Am. Chem. Soc. 134, 8038-8041, doi:10.1021/ja302082d (2012).
[0493] 22 Hofmann, F. T., et al., Journal of the American Chemical Society 134, 8038-8041, doi:10.1021/ja302082d (2012).
[0494] 23 Sakai, K. et al. et al., Nature Chemical Biology 15, 598-606, doi:10.1038/s41589-019-0285-7 (2019).
[0495] 24 Fleming, S. R. et al. et al., J. Am. Chem. Soc., doi:10.1021/jacs.0c01576 (2020).
[0496] 25 Scott, J. K. & Smith, G. P. et al., Science 249, 386-390, doi:10.1126/science.1696028 (1990).
[0497] 26 Urban, J. H. et al. Nat. Commun. 8, 1500, doi:10.1038/s41467-017-01413-7 (2017).
[0498] 27 Hetrick, K. J., et al., ACS Cent Sci 4, 458-467, doi:10.1021/acscentsci.7b00581 (2018).
[0499] 28 Owens, A. E., et al., doi:10.1021/acscentsci.9b00927 (2019).
[0500] 29 Tiede, C. et al. et al., Protein Engineering, Design and Selection 27, 145-155, doi:10.1093/protein/gzu007 (2014).
[0501] 30 Barderas, R. & Benito-Peña, E. et al., Anal. Bioanal. Chem. 411, 2475-2479, doi:10.1007/s00216-019-01714-4 (2019).
[0502] 31 Barbas, C. F., et al., Proceedings of the National Academy of Sciences of the United States of America 88, 7978-7982, doi:10.1073/pnas.88.18.7978 (1991).
[0503] 32 Beerli, R. R. et al. Proceedings of the National Academy of Sciences of the United States of America 105, 14336-14341, doi:10.1073/pnas.0805942105 (2008).
[0504] 33 Nixon, A. E., et al., MAbs 6, 73-85, doi:10.4161/mabs.27240 (2014).
[0505] 34 Heinis, C., et al., Nat Chem Biol 5, 502-507, doi:10.1038/nchembio.184 (2009).
[0506] 35 Millward, S. W., et al., ACS Chem Biol 2, 625-634, doi:10.1021/cb7001126 (2007).
[0507] 36 Frankel, A., et al., Chem Biol 10, 1043-1050, doi:10.1016/j.chembiol.2003.11.004 (2003).
[0508] 37 Shah, N. H. & Muir, T. W. Chem. Sci. 5, 446-461, doi:10.1039/C3SC52951G (2014).
[0509] 38 Stevens, A. J. et al. J. Am. Chem. Soc. 138, 2162-2165, doi:10.1021/jacs.5b13528 (2016).
[0510] 39 Stynen, B., et al., Microbiol. Mol. Biol. Rev. 76, 331-382, doi:10.1128/MMBR.05021-11 (2012).
[0511] 40 Miranda, E. et al. J. Am. Chem. Soc. 135, 10418-10425, doi:10.1021/ja402993u (2013).
[0512] 41 Yang, X. et al. Nat. Chem. Biol. 14, 375-380, doi:10.1038/s41589-018-0008-5 (2018).
[0513] 42 Tavassoli, A. Curr. Opin. Chem. Biol. 38, 30-35, doi:10.1016/j.cbpa.2017.02.016 (2017).
[0514] 43 Pu, J., Zinkus-Boltz, J. & Dickinson, B. C. Nature Chemical Biology 13, 432-438, doi:10.1038/nchembio.2299 (2017).
[0515] 44 Horswill, A. R., et al., Proc. Natl. Acad. Sci. U.S.A 101, 15591-15596, doi:10.1073/pnas.0406999101 (2004).
[0516] 45 Tominaga, M., et al., PLoS One 10, e0120243, doi:10.1371/journal.pone.0120243 (2015).
[0517] 46 Kawai-Noma, S. et al. J. Biosci. Bioeng., doi:10.1016/j.jbiosc.2020.03.002 (2020).
[0518] 47 Tavassoli, A. & Benkovic, S. J. Angew Chem Int Ed Engl 44, 2760-2763, doi:10.1002/anie.200500417 (2005).
[0519] 48 Yao, Z. et al. Nature Communications 11, 2440-2440, doi:10.1038/s41467-020-16299-1 (2020).
[0520] 49 Pinto, F., et al., Nature Communications 11, 1-15, doi:10.1038/s41467-020-15272-2 (2020).
[0521] 50 Letko, M., et al., Nat Microbiol 5, 562-569, doi:10.1038/s41564-020-0688-y (2020).
[0522] 51 Walls, A. C. et al. Cell, doi:10.1016/j.cell.2020.02.058 (2020).
[0523] 52 Hoffmann, M. et al. Cell, doi:10.1016/j.cell.2020.02.052 (2020).
[0524] 53 Tortorici, M. A. & Veesler, D. Adv Virus Res 105, 93-116, doi:10.1016/bs.aivir.2019.08.002 (2019).
[0525] 54 Huo, J. et al. Nat. Struct. Mol. Biol., doi:10.1038/s41594-020-0469-6 (2020).
[0526] 55 Jiang, S., et al., Trends Immunol. 41, 355-359, doi:10.1016/j.it.2020.03.007 (2020).
[0527] 56 Wec, A. Z. et al. Science, doi:10.1126/science.abc7424 (2020).
[0528] 57 Renn, A., et al., Trends Pharmacol Sci, doi:10.1016/j.tips.2020.07.004 (2020).
[0529] 58 Schoof, M. et al. doi:10.1101/2020.08.08.238469 (2020).
[0530] 59 Cao, L. et al. Science, doi:10.1126/science.abd9909 (2020).
[0531] 60 Zhang, G. et al. bioRxiv, 2020.2003.2019.999318, doi:10.1101/2020.03.19.999318 (2020).
[0532] 61 Kreutzer, A. G. et al. bioRxiv (2020).
[0533] 62 Zhao, J. & Jiang, X. Chinese Chemical Letters 29, 1079-1087 (2018).
[0534] 63 Hudson, G. A. et al. J. Am. Chem. Soc., doi:10.1021/jacs.9b01519 (2019).
[0535] 64 Roh, H., et al., Chembiochem 20, 1051-1059, doi:10.1002/cbic.201800678 (2019).
[0536] 65 Rhodius, V. A. et al. Mol. Syst. Biol. 9, 702, doi:10.1038/msb.2013.58 (2013).
[0537] 66 Pinto, F., et al., Nat. Commun. 11, 1529, doi:10.1038/s41467-020-15272-2 (2020).
[0538] 67 Moll, U. M. & Petrenko, O. Mol. Cancer Res. 1, 1001-1008 (2003).
[0539] 68 Kussie, P. H. et al. Science 274, 948-953, doi:10.1126/science.274.5289.948 (1996).
[0540] 69 Li, C. et al. J. Mol. Biol. 398, 200-213, doi:10.1016/j.jmb.2010.03.005 (2010).
[0541] 70 Meyer, A. J., et al., Nat. Chem. Biol., doi:10.1038/s41589-018-0168-3 (2018).
[0542] 71 Zhang, G., et al., bioRxiv, doi:10.1101/2020.03.19.999318 (2020).
[0543] 72 Hegemann, J. D., et al., ACS Synth. Biol., doi:10.1021/acssynbio.9b00080 (2019).
[0544] 73 Precord, T. W., et al., ACS Chem Biol 14, 1981-1989, doi:10.1021/acschembio.9b00457 (2019).
[0545] 74 Sardar, D., et al., Chem Biol 22, 907-916, doi:10.1016/j.chembiol.2015.06.014 (2015).
[0546] 75 Zong, C., et al., ACS Chem. Biol. 11, 61-68, doi:10.1021/acschembio.5b00745 (2016).
[0547] 76 Noy-Porat, T. et al. Nat. Commun. 11, 4303, doi:10.1038/s41467-020-18159-4 (2020).
[0548] 77 Chen, J. et al. World J. Gastroenterol. 11, 6159-6164, doi:10.3748/wjg.vl1.i39.6159 (2005).
[0549] 78 Glassey, E., et al., ACS Synth. Biol. (2020).
[0550] 79 Zhang, Q. et al. Proc. Natl. Acad. Sci. U.S.A 111, 12031-12036, doi:10.1073/pnas.1406418111 (2014).
[0551] 80 Funk, M. A. & van der Donk, W. A. Acc. Chem. Res. 50, 1577-1586, doi:10.1021/acs.accounts.7b00175 (2017).
[0552] 81 van der Velden, N. S. et al. Nat. Chem. Biol., doi:10.1038/nchembio.2393 (2017).
[0553] 82 Morinaka, B. I. et al. Science 359, 779-782, doi:10.1126/science.aao0157 (2018).
[0554] 83 Naylor, M. R., et al., Curr. Opin. Chem. Biol. 38, 141-147, doi:10.1016/j.cbpa.2017.04.012 (2017).
[0555] 84 Fellner, R. C., et al., Mol Cell Pediatr 3, 16, doi:10.1186/s40348-016-0044-8 (2016).
[0556] 85 Barth, P. et al. J. Cyst. Fibros. 19, 299-304, doi:10.1016/j.jcf.2019.08.020 (2020).
[0557] 86 Xia, S. et al Cell Res 30, 343-355, doi:10.1038/s41422-020-0305-x (2020).
[0558] 87 Gavrish, E. et al. Chem. Biol. 21, 509-518, doi:10.1016/j.chembiol.2014.01.014
[0559] (2014).
[0560] 88 Delgado, M. A., et al., J Bacteriol 183, 4543-4550, doi:10.1128/JB.183.15.4543-4550.2001 (2001).
[0561] 89 Rao, J., et al., Journal of the American Chemical Society 122, 2698-2710, doi:10.1021/ja9926481 (2000).
[0562] 90 Zhu, Y., et al., J. Virol. 94, doi:10.1128/JVI.00635-20 (2020).
[0563] 91 Xia, S. et al. bioRxiv, doi:10.1101/2020.03.09.983247 (2020).
[0564] 92 Cao, Y. et al. Cell 182, 73-84.e16, doi:10.1016/j.cell.2020.05.025 (2020).
[0565] 93 Rogers, T. F. et al. Science 369, 956-963, doi:10.1126/science.abc7520 (2020).
[0566] 94 Si, L. et al. doi:10.1101/2020.04.13.039917.
[0567] 95 Segall-Shapiro, T. H., et al., Nat. Biotechnol., doi:10.1038/nbt.4111 (2018).
[0568] 96 Patiny, L. & Borel, A. J Chem Inf Model 53, 1223-1228, doi:10.1021/ci300563h (2013).
[0569] 97 Yan, R. et al. Science, doi:10.1126/science.abb2762 (2020).

### Example 5: Optimization of Peptide Binders

[0570] AMK-1057, a small peptide binder, was evaluated for cell competition between the Receptor Binding Domain (RBD) of the SARS-CoV-2 Spike protein and the human ACE2 receptor. RBD incubated with and without AMK-1057 was mixed with ACE2 cells, washed, and quantified via flow cytometry (FIG. 16A). Measurement of a fluorescence marker on the RBD demonstrated a slight decrease in binding of RBD to ACE2-expressing cells after the RBD was pre-incubated with the RBD, relative to RBD in the absence of AMK-1057, and the effect was stronger with higher concentration of AMK-1057 (FIG. 16B). The results demonstrate that the high nanomolar binding of AMK-1057 to RBD is not sufficient to robustly block RBD-ACE2 binding. A two-hybrid system was constructed to evaluate the effect of construct expression level on binding. Peptides with published K_{D} values were tested in the presence of on-target or off-target baits under conditions in which the peptides were expressed at a low level (FIG. 18B) or a high level (FIG. 18C). The results demonstrated that expression level of a given peptide can affect the ability to detect its binding to bait, and that lower expression allowed observation of differences in binding between on-target and off-target baits, whereas higher expression masked this effect to some extent. Scanning site saturation mutagenesis was performed on the core residues of AMK-1057 and variant enrichment was monitored using next-generation sequencing (FIG. 19A). Three positions that showed positive variant enrichment relative to the parent sequence were selected (arrows in FIG. 19A) and constructs expressing various combinations of amino acid substitutions at these positions were generated and evaluated for binding via flow cytometry. Each of the tested combinations of AMK-1057 variants showed improved binding relative to the parent peptide (FIG. 19B). The results demonstrate that screening of peptides with individual amino acid substitutions allows prediction of improved peptides with multiple substitutions.

[0571] Bio-layer interferometry was used to assay AMK-1057 competition for binding to RBD in the presence of B38 and CR3022 antibodies as well as purified ACE2 for the purpose of mapping what region of the RBD AMK-1057 may bind. RBD binding to AMK-1057 was not affected by the presence of B38 (FIG. 20A), CR3022 (FIG. 20B), or ACE2 (FIG. 20C).

### Example 6: Large Scale Genome Mining of the Human Microbiome for Targeted Antibiotic Discovery

[0572] The human microbiome harbors substantial biosynthetic potential for specialized metabolites with roles in host-microbe and microbe-microbe interactions. Analysis of genomic sequence data from the Human Microbiome Project shows an untapped source of post-translationally modified peptides, a class of molecule demonstrated to have important effects on human health and disease. Genome mining approaches, wherein DNA sequences are synthesized de novo and heterologously expressed in chassis organisms, can be leveraged to access the molecules encoded in human microbiome sequence data. However, robust methods for large-scale interrogation of sequence space through DNA synthesis and heterologous expression have yet to be developed. Here, 78 biosynthetic gene clusters were selected for post-translationally modified peptides from a diverse set of human microbiome strains from all niches of the human body. Production of peptides was shown in a format suitable for screening their biological activity and novel molecules with unique spectra of antimicrobial activity against members of the human microbiome and pathogenic bacteria of clinical significance were identified. This work demonstrates that large-scale genome mining of peptidic natural products and functional assaying for their biological activity is possible through a DNA sequence-to-molecule pipeline.

[0573] Revealing how the human microbiome affects health at a mechanistic level will continue to be critical in understanding disease and developing new therapies¹. Discovery and characterization of specialized metabolites (small molecules, peptides) is of particular interest due to their important role in biological systems and pharmaceutical potential as standalone agents or effectors in cell-based therapeutics². Traditional approaches to the isolation of specialized metabolites from the human microbiome have been hampered by access to putative producing organisms and difficulties in eliciting production. A number of bioinformatics tools are now available to parse ever-increasing DNA sequence data, annotate biosynthetic gene clusters, and assign basic molecular predictions³. These tools make possible a “sequence-to-molecule” approach, wherein mining DNA sequence databases, selecting gene clusters for DNA synthesis, and heterologous expression can yield specialized metabolites of value. However, the rate of molecular production is orders of magnitude behind in silico identification of the encoding DNA. Production of molecules is handicapped by difficulties with the large size of many gene clusters, appropriate heterologous production hosts, and standardized approaches for their purification as well as structural elucidation⁴.

[0574] Ribosomally synthesized and post-translationally modified peptides (RiPPs) are a class of specialized metabolite particularly abundant in human microbiome DNA sequence data⁵⁻⁷. RiPPs are defined by a conserved biosynthetic logic wherein a precursor peptide (comprised of a “leader” and “core” region) is ribosomally produced, the core subsequently altered by modifying enzymes that often recognize sequence motifs in the leader, then ultimately processed and exported (FIG. 20). For example, lanthipeptides are polycyclic peptides defined by the presence of thioether macrocycles formed via addition of a cysteine thiol to dehydrated serine and threonine residues (dehydroalanine and dehydrobutyrine, respectively). Dehydration of the core peptide and subsequent cyclization are catalyzed by a single, bifunctional enzyme or by two separate proteins, depending on the class of lanthipeptide⁵. Lasso peptides are formed via a complex of 2-3 proteins that recognize leader motifs, cleave the leader peptide, and use the resulting free amine to form an isopeptide bond with a downstream carboxyl side chain from an Asp/Glu residue⁵. The resulting constrained peptides are not only structurally diverse but also enriched in biological activity. RiPPs produced by the human microbiome are responsible for a remarkable range of microbe-host interactions^{8,9} as well as microbe-microbe interactions¹⁰⁻¹³ with pronounced effects upon human health.

[0575] As of 2015, 100 lanthipeptides had been discovered from microbes¹⁴ and half that number of lasso peptides¹⁵. New computational approaches to RiPP genome mining have yielded impressive advances in the discovery of RiPP subclasses and scaffolds but actual molecular discovery is relatively low (˜1-5 molecules per report) and functional assaying is either absent or narrow in scope¹⁶⁻²¹. The flexible biosynthesis afforded by RiPPs has also led to a number of innovative strategies for generating large libraries around a given peptide scaffold linked to a functional output. These include libraries based on the lasso peptide microcin J25²², the thiopeptide thiocillin²³, and the lanthipeptides nisin, prochlorosin, haloduracin, and lacticin 481²⁴⁻²⁸. While of outstanding value, these approaches all require specialized assays and selections and do not exploit specific biological activities afforded by natural evolution. There is a need for higher throughput approaches to purify, express, and structurally annotate RiPPs that can then be tested in diverse functional assays. Here, an E. coli-based expression system was used to mine 78 RiPP gene clusters to generate 23 new lanthipeptides and lasso peptides from the human microbiome. The established pipeline was able to go from DNA sequence information to a structurally and functionally annotated molecule in relatively high-throughput. These 23 structurally annotated RiPPs, combined with 7 RiPPs with unknown modification, were demonstrated to have unique scaffolds and spectra of antimicrobial activity when tested against a large panel of human microbiome-associated strains. A subset of these RiPPs were shown to possess activity against multidrug resistant (MDR) clinical isolates of human pathogens, including vancomycin resistant Enterococcus and methicillin-resistant Staphylococcus aureus. This provides a robust method for accessing a vast and underexplored chemical space of the human microbiome.

### Results

### Selection of Human Microbiome RiPP Gene Clusters for Heterologous Expression

[0576] AntiSMASH²⁹ was used to identify 2,233 RiPP gene clusters from 2,231 genomes of the Human Microbiome Project (HMP)³⁰. BiG-SCAPE³¹ was then used to generate a sequence similarity map of these gene clusters to visualize the abundance of different subclasses of RiPP (FIG. 21 and FIG. 22). Previously identified RiPP gene clusters from the Joint Genome Institute (JGI)^{6,32} were also included in the analysis. Clusters were not prioritized based on any perceived contribution to health of a producing organisms; pathogens are an equally useful source of biologically active molecules with therapeutic potential^{33,34}. From this survey, it was decided to pursue genome mining of two RiPP subclasses enriched in the human microbiome: lanthipeptides and lasso peptides.

[0577] In addition to the defining biosynthetic enzymes described above (LanBC, LanM, LanK for lanthipeptides; LasBC for lasso peptides), “tailoring enzymes” that further chemically diversify peptides can be encoded in gene clusters. Tailoring enzymes can modify bioactivity of peptides and have promise in functioning as catalysts for engineering RiPPs³⁵ so open reading frames encoding putative tailoring enzymes were included in the mining workflow. Novel tailoring enzymes were not identifiable by existing in silico methods so a script was developed to identify and count the presence of all protein family (pfam) domains found in gene clusters annotated by AntiSMASH. These pfam counts were converted to relative abundance by dividing raw counts by the presence of core biosynthetic enzymes (lanBC/M/K; lasBC) and rank-ordered to profile prevalence of certain pfam domains in each subclass of RiPP investigated here (FIGS. 28A-28D). Certain pfam domains feasibly associated with biosynthesis (acetyltransferases, flavoproteins, epimerases, methyltransferases, dehydrogenases, aminotransferases, and glycosyltransferases) were modestly enriched. This analysis was coupled to manual inspection of each cluster for putative tailoring enzymes, then candidate genes were synthesized and assembled into single expression plasmids using an orthogonal set of inducible promoters³⁶ (FIG. 28E).

[0578] 78 gene clusters were selected from 68 diverse organisms spanning 6 classes and occupying airway, gastrointestinal (GI) tract, oral, skin, and urogenital (UG) tract microbiomes (FIG. 24, Table 11). A two-plasmid expression system was used wherein putative precursor peptides and modifying enzymes are synthesized and assembled in plasmids under control of inducible promoters (FIG. 25), singly- or doubly-transformed into E. coli, and analyzed by liquid chromatography-mass spectrometry (LC-MS) for retention and mass shifts indicative of peptide modification (FIG. 26)³⁷. Peptides were engineered to possess either an N-terminal or C-terminal (lanthipeptides and lasso peptides, respectively) hexa-histidine-small ubiquitin-like modifier (SUMO) tag for affinity purification and increased peptide stability (HS-tag) (FIGS. 23A and 23B). Peptides were also engineered to possess protease sites in order to remove the HS-tag and leader peptide (FIGS. 23C and 23D), which enabled structural annotation of lanthipeptides through hypothetical structure enumeration and evaluation (HSEE)³⁸ (FIG. 27). The entire process of assembly, transformation, growth, and purification was optimized for the use of 96-well microtiter plates (FIG. 23E)³⁷.

TABLE 11
Bacterial strains used in Example 6.

| Species | Niche | Strain | Source | Media | Growth |
|---|---|---|---|---|---|
| Streptococcus pneumoniae | Airways | Streptococcus pneumoniae | Ribbick lab | TSBb | anaerobic |
| | | TIGR4 | | | |
| Dolosigranulum pigrum | Airways | Dolosigranulum | ATCC | TSBb | aerobic |
| | | pigrum Aguirre et al. | | | |
| | | (ATCC ® 51524 ™) | | | |
| Staphylococcus caprae | Airways | Staphylococcus | ATCC | TSBb | aerobic |
| | | caprae (ATCC ® 55133 ™) | | | |
| Staphylococcus capitis | Airways, | Staphylococcus capitis | Voigt lab | TSBb | aerobic |
| | skin | TA281 (JAB794) | | | |
| Staphylococcus epidermis | Airways, | Staphylococcus epidermidis | Voigt lab | TSBb | aerobic |
| | skin | TA278 (JAB793) | | | |
| Streptococcus infantarius | Gut | Streptococcus infantarius | Voigt lab | TSBb | anaerobic |
| | | subsp. infantarius ATCC- | | | |
| | | BAA-102 (JAB516) | | | |
| Bacteroides_{—}dorei | Gut | aa_0143_0002_h6 | OpenBiome | BHIs | anaerobic |
| Bacteroides_{—}faecis | Gut | aa_0143_0089_f9 | OpenBiome | BHIs | anaerobic |
| Bacteroides_{—}thetaiotaomicron | Gut | af_0058_0071_a4 | OpenBiome | BHIs | anaerobic |
| Bifidobacterium_{—}adolescentis | Gut | ao_0067_0069_a1 | OpenBiome | BHIs | anaerobic |
| Bifidobacterium_{—}longum | Gut | am_0171_0090_c1 | OpenBiome | BHIs | anaerobic |
| Citrobacter_{—}amalonaticus | Gut | ao_0067_0062_a8 | OpenBiome | BHIs | anaerobic |
| Enterococcus_{—}avium | Gut | ao_0067_0069_c1 | OpenBiome | BHIs | anaerobic |
| Enterococcus_{—}durans | Gut | am_0171_0068_e1 | OpenBiome | BHIs | anaerobic |
| Enterococcus_{—}mundtii | Gut | am_0171_0068_d4 | OpenBiome | BHIs | anaerobic |
| Leuconostoc_{—}lactis | Gut | aa_0143_0055_c12 | OpenBiome | BHIs | anaerobic |
| Paeniclostridium_{—}sordellii | Gut | av_0103_0069_f8 | OpenBiome | BHIs | anaerobic |
| Parabacteroides_{—}distasonis | Gut | cx_0004_0077_a10 | OpenBiome | BHIs | anaerobic |
| Parabacteroides_{—}goldsteinii | Gut | aa_0143_0055_a8 | OpenBiome | BHIs | anaerobic |
| Pediococcus_{—}acidilactici | Gut | cx_0004_0082_e12 | OpenBiome | BHIs | anaerobic |
| Ruthenibacterium_{—}lacta- | Gut | am_0070_0084_c5 | OpenBiome | BHIs | anaerobic |
| tiformans | | | | | |
| Sellimonas_{—}intestinalis | Gut | am_0224_0084_c8 | OpenBiome | BHIs | anaerobic |
| Veillonella_{—}dispar | Gut | bj_0095_0068_g5 | OpenBiome | BHIs | anaerobic |
| Streptococcus sobrinius | oral | Streptococcus sobrinius 6715 | Ribbick lab | TSBb | anaerobic |
| Streptococcus mitis | oral | Streptococcus | ATCC | TSBb | anaerobic |
| | | mitis Andrewes and Horder | | | |
| | | emend. Judicial Commission | | | |
| | | (ATCC ® 49456 ™) | | | |
| Streptococcus gordonii | oral | Streptococcus gordonii Kilian | ATCC | TSBb | anaerobic |
| | | et al. (ATCC ® 33399 ™) | | | |
| Streptococcus mutans | oral | Streptococcus mutans UA159 | Ribbick lab | TSBb | anaerobic |
| Rothia dentocariosa | oral | Rothia dentocariosa (Onishi) | ATCC | TSBb | aerobic |
| | | Georg and Brown | | | |
| | | (ATCC ® 17931 ™) | | | |
| Corynebacterium striatum | Skin | Corynebacterium | ATCC | TSBb | aerobic |
| | | striatum (Chester) Eberson | | | |
| | | (ATCC ® 6940) | | | |
| Micrococcus luteus | Skin | Micrococcus | Wright lab | TSBb | aerobic |
| | | luteus (Schroeter) Cohn | | | |
| | | (ATCC ® 10240 ™) | | | |
| Staphylococcus aureus | Skin | Staphylococcus aureus subsp. | Voigt lab | TSBb | aerobic |
| | | aureus ATCC-19685 | | | |
| | | (JAB849) | | | |
| Staphylococcus hominis | Skin | Staphylococcus | ATCC | TSBb | aerobic |
| | | hominis subsp. hominis Kloos | | | |
| | | and Schleifer | | | |
| | | (ATCC ® 27844 ™) | | | |
| Streptococcus dysgalactiae | Skin | Streptococcus dysgalactiae | Voigt lab | TSBb | aerobic |
| | | TA380 (JAB792) | | | |
| Streptococcus sanguinis | Skin, oral | Streptococcus | Ribbick lab | TSBb | anaerobic |
| | | sanguinis White and Niven | | | |
| | | emend. Kilian et al. | | | |
| | | (ATCC ® 10556 ™) | | | |
| Lactobacillus crispatus JV-V01 | vagina | L. crispatus JV-V01 | Mitchell lab | MRS | anaerobic |
| Lactobacillus jensenii ATCC | vagina | L. jensenii ATCC 25258 | Mitchell lab | MRS | anaerobic |
| 25258 | | | | | |
| Lactobacillus gasseri ATCC | vagina | L. gasseri ATCC 33323 | Mitchell lab | MRS | anaerobic |
| 33323 | | | | | |
| Acinetobacter baumannii | pathogen | 0033 | CDC | TSBb | aerobic |
| Aspergillus fumigatus | pathogen | 0731 | CDC | SDA | aerobic |
| Campylobacter jejuni | pathogen | 0412 | CDC | TSBb | aerobic |
| Candida albicans | pathogen | 0761 | CDC | SDA | aerobic |
| Enterococcus faecalis | pathogen | 0679 | CDC | TSBb | aerobic |
| Enterococcus faecium | pathogen | 0572 | CDC | TSBb | aerobic |
| Escherichia coli | pathogen | 0011 | CDC | TSBb | aerobic |
| Klebsiella pneumoniae | pathogen | 0112 | CDC | TSBb | aerobic |
| Pseudomonas aeruginosa | pathogen | 0508 | CDC | TSBb | aerobic |
| Salmonella Typhimurium | pathogen | 0408 | CDC | TSBb | aerobic |
| Staphylococcus aureus | pathogen | 0215 | CDC | TSBb | aerobic |

E. coli is an Effective Chassis Organism for Genome Mining of RiPPs

[0579] Application of this workflow to the selected gene clusters resulted in the detection and subsequent structural annotation of 18 lanthipeptides and 5 lasso peptides (FIG. 29). FIG. 29 shows total ion chromatograms (TICs) of TALON purified microtiter plate expressions. The HS-peptides were clearly identifiable via their mass shifts (water losses, −18 Da) using a low-resolution instrument and the detected peaks are highlighted. All of the peptides highlighted in FIG. 29 were successfully expressed, purified, dialyzed, cleaved, and SPE purified at 0.5 L scale and then subject to liquid chromatography tandem mass spectrometry (LC-MS/MS). Structures were annotated using HSEE, which is a method wherein all hypothetical modified peptide structures are enumerated in silico and compared to observed fragments from the MS/MS experiment^{37,38}. N-Ethylmaleimide was used to determine the extent of cyclization for lanthipeptides and infer macrocycle topology via absence of fragmentation, as was demonstrated previously³⁹⁻⁴⁵. RiPPs from all microbiome niches were discovered but with varying rates of success: airways/other (2/11, 18%), GI (4/29, 14%), oral (11/23, 48%), skin (2/7, 29%), and UG (3/6, 50%).

[0580] 7 lanthipeptide clusters generated retention/mass shifts in the presence of modifying enzymes but mass shifts weren't consistent with known modification patterns. Of particular interest were several producing strains that showed modifications via retention time/mass shift when putative tailoring enzymes were expressed (FIG. 31A-31D). For both above examples the mass spectra could be difficult to deconvolute, but expression differences were clear with the addition of modifying enzyme(s), as in HMLn020 (sAMK-730 from Bifidobacterium sp.) (FIG. 31A). In another example, expression of the core biosynthetic enzymes and putative peptide lanA2 from cluster HMLn034 (sAMK-740 from Dolosigranulum pigrum) resulted in production and mass detection of a 6×-dehyrated peptide lacking the last eight residues of its C-terminus, presumably from unanticipated proteolysis via E. coli enzymes. Additional expression of putative tailoring enzymes resulted in the production and detection of a higher molecular weight peptide consistent with a modified sequence lacking the last three residues of its C-terminus (FIG. 31B). Most strikingly, expression of the core biosynthetic enzymes and a putative peptide from cluster HMLn009 (sAMK-720 Myroides odoratimimus) did not result in any modification of the precursor peptide but additional expression of three putative tailoring enzymes resulted in a mass shift of −533.2 Da (FIG. 31C). Expression of one gene in particular, a KptA-like protein, was shown to be necessary for the observed modification. Homologs of KptA have been implicated in peptide modification⁴⁶. Selective induction of the Marionette orthogonal expression system enabled the simultaneous expression of all putative genes and systematic interrogation of their contribution to biosynthesis, demonstrating its utility in genome mining via construction of a single strain.

[0581] A diverse selection of producing organisms were selected from which to mine lanthipeptide sequences for heterologous expression and whether gene clusters from particular genera were more or less suitable for expression in E. coli was investigated. To this end, a taxonomic tree of all lanthipeptide-producing organisms (with E. coli BL21 for reference) selected for this study was generated. Strains from which that successfully produced a RiPP were highlighted to detect trends (FIG. 32A). Lanthipeptides originating from all Classes of strains used in this study were successfully expressed and no obvious trends in failures or successes observed. The biosynthesis of type I lanthipeptides was next considered. Type I lanthipeptides are unusual in their requirement for glutamyl-tRNA (tRNAGlu) to activate Ser/Thr residues for dehydration (FIG. 32B) as opposed to using ATP, as in type II-IV lanthipeptide biosynthesis (FIG. 32C)⁴⁷. Sequence differences in tRNAGlu have been shown to be important in heterologous expression of lanB-type enzymes⁴⁸. Sequences for tRNAGlu from all species mined for type I lanthipeptide biosynthesis were used to generate a phylogenetic tree. Sequence homology of tRNAGlu was not important in analysis of successful production using E. coli as chassis, but no gene clusters from strains possessing alternative anticodon loops (CTC as opposed to TTC) were successfully produced, consistent with previous reports and predictions⁴⁸.

### Heterologous Expression of RiPP Gene Clusters Suitable for Functional Assaying

[0582] 96-well microtiter growths (2×1 mL TB media) were purified and processed and optimal conditions for assaying biological activity were considered. Agar plate-based assays that demonstrate antimicrobial activity via zones of inhibition are an ideal method since compounds do not suffer dilution as in liquid-based readouts of optical density. Microtiter-purified RiPPs were initially tested against a subset of human microbiome-associated strains (Staphylococcus aureus, Streptococcus infantarius, Streptococcus dysgalactiae, Pediococcus acidilactici, Pseudofalnovifractor spp., and Bacteroides faecis) to assess this plate-based method and several producing strains (sAMK-287, sAMK-687, sAMK-691) showed varying zones of inhibition against this initial test set of indicator strains (FIG. 33A). While clear activity was observed in some cases, inconsistencies in colony density ruled out this method as a systematic means for detecting antimicrobial activity of RiPPs against a diverse panel of strains.

[0583] To streamline functional assaying, 96-well microtiter growths were optimized for a large collection of indicator strains sourced from a variety of niches found in the human microbiome (Table 11). The large-scale antimicrobial profiling of 30 SPE purified RiPPs (including both peptides that were confirmed via the structural annotation pipeline as well as putative modified peptides) showed that 8/30 demonstrated unique antimicrobial “fingerprints”. Of these active peptides, 7/8 could be grouped either through a common source cluster (AMK-286, 287, 916; AMK-917, 1009, 1010) or a common structural scaffold (AMK-417, 687, 691). The eighth, AMK-720, is an uncharacterized modified peptide that showed exceptionally broad antimicrobial activity. The structure and biosynthesis of AMK-720 are still under investigation, but structure-function relationships for the other three groups of peptides are described below.

### Human Microbiome RiPPs Possess Unique Antimicrobial Fingerprints

[0584] The type II lanthipeptides AMK-286, AMK-287, and AMK-916 were based on genes from an oral strain of Streptococcus and share identical modification profiles (FIGS. 35A and 35C), including the consistent presence of a phosphoryl group on the most N-terminal threonine residue, which is a novel observation for enzymes of this class. Several features were apparent from the antimicrobial activity patterns of these related molecules (FIG. 35B). They (in particular AMK-287) demonstrated pronounced activity against strains of the alimentary tract, including Bifidobacterium adolescenits, Bifidobacterium longum, Sellimonas intestinalis, and Streptococcus dysgalactiae. The interplay between the oral microbiome and alimentary tract is complex and elucidating chemical mechanisms by which oral strains can disrupt and colonize the gut is critical to understanding the roles of certain strains in health and disease⁴⁹. B. adolescenits and B. longum, for instance, are associated with anxiety and depression in mammals via substantial production of gamma-Aminobutyric acid⁵⁰. These Streptococcus-derived RiPPs also demonstrated remarkably narrow spectrum activity with respect to other Streptococci (only significant activity observed against 1/5 Streptococcal strains). This suggested that an oral-derived Streptococcus produced a suite of molecules lacking activity against closely related members of the oral microbiomes⁵¹.

[0585] The lasso peptides AMK-917, 1009, and 1010 are from an oral strain of Rothia dentocariosa and exhibit conserved primary amino acid sequence about the lariat structure, with some degeneracy (FIGS. 35D-35F). The predicted amino acid sequences of these lasso peptides are substantially longer than others that were expressed in this study (Table 12) and antimicrobial activity tracked inversely with length of the core (FIG. 35E). The use of a C-terminal Factor Xa cleavage site (which leaves an “RLVPR (SEQ ID NO: 714)” scar) likely further exacerbated this negative trend. AMK-1008 was another predicted lasso peptide from the same gene cluster that was not observed during heterologous expression and had a much longer core sequence (AMK-917, 24 aa; AMK-1008, 37 aa; AMK-1009, 30 aa; and AMK-1010, 19 aa). Based on the amino acid sequence alignment (FIG. 35D), it was determined that AMK-1008 and AMK-1009 may be processed by non-cluster associated proteases that cleave before or after the “GG” at position 25. As such, discovery and application of scarless C-terminal proteases as well as iterations on core sequences used in heterologous expression will likely be important in genome mining lasso peptides.

[0586] Amino acid sequence alignments showed that AMK-417, 687, and 691 belong to the same family of RiPPs as lacticin 481 and the structural annotation was consistent with a similar cyclization pattern (FIGS. 57A-57C). Because AMK-687 displayed such remarkable antimicrobial activity and 2/5 strains were from the vaginal microbiome, the activity of these peptides was tested against Lactobacillus crispatus, a dominant member of the healthy vaginal microbiome⁵². AMK-687 displayed even more pronounced activity against this related strain while AMK-691 also demonstrated activity but other lanthipeptides tested were inactive (FIG. 57D). The strong activity of AMK-687 was noteworthy because Lactobacillus iners is implicated in transition of a healthy vaginal microbiome to an unhealthy one via depletion of the predominant Lactobacillus crispatus and related strains, but the exact mechanisms by which this dysbiosis occurs are largely unknown⁵³.

TABLE 12
Microbiome RiPPs

| Strain | | | SEQ ID |
|---|---|---|---|
| designation | Producing organism | Core primary amino acid sequence | NO |
| sAMK271 | Streptococcus_pneumoniae_ | GTDGADPRSTIICSATLSFIASYLGSAQTRCGKDN | 115 |
| | SPAR95 | KKK | |
| sAMK285 | Streptococcus_sp._ | GIDTLDYEISHQELSGKSAAGWQTAFRLTMQGR | 116 |
| | M334 | CGGVFTLSYECATPHVSCG | |
| sAMK286 | Streptococcus_sp._ | GGGWYTAFKLTLAGRCGLCFTCSYECTSNNVHC | 117 |
| | M334 | | |
| sAMK287 | Streptococcus_sp._ | GGWFTAIQLTLAGRCGNWFTGSFECTSNNVKCG | 118 |
| | M334 | | |
| sAMK293 | Rothia dentocariosa | GTAFPGWYSKVIGNRGRVCTVTVECMSVCQ | 119 |
| sAMK298 | Ruminococcus | GVGYTTYWGILPLVTKNPQICPVSENTVKCRLL | 120 |
| | flavefaciens | | |
| sAMK299 | Ruminococcus | GASTLPCAEVVVTVTGIIVKATTGFDWCPTGACT | 121 |
| | flavefaciens | HSCRF | |
| sAMK360 | Clostridium spp. | GEAVSYTLNCTHFLTILCC | 122 |
| sAMK416 | Corynebacterium_ | GTHPSTLIPISIALCPTTRCSRRC | 123 |
| | matruchotii_ATCC_14266 | | |
| sAMK417 | Gardnerella_vaginalis_ | GGDGVMHTLTHECHMNTWQFLLTCC | 124 |
| | 5-1 | | |
| sAMK418 | Rothia_dentocariosa_ | GGHGGGYSGGGYSGGGNSGGGNYCGNGCGNY | 125 |
| | M567 | NFGFGF | |
| sAMK419 | Clostridium_botulinum_ | GTFSEGTISITLSVYMGNDGKVCTWTVECQNNCS | 126 |
| | H04402_065 | HKK | |
| sAMK 421 | Myroides odoratimimus | GGGNSSKLYGSKGASCTCGNGVTCGTQQTKSGF | 127 |
| | CIP 103059 | EE | |
| sAMK687 | Lactobacillus iners | GSRWWQGVLPTVSHECRMNSFQHIFTCC | 128 |
| sAMK691 | Streptococcus pyogenes | GGKNGVFKTISHECHLNTWAFLATCCS | 129 |
| sAMK692 | Streptococcus pyogenes | GRGHGVNTISAECRWNSLQAIFTCC | 130 |
| sAMK695 | Mobiluncus mulieris | GTSIPCGTLIIATLTQCFNDTLVWGSCRLGTRACC | 131 |
| sAMK696 | Streptococcus | GMRFSTFSTNRCGNWSAFSWENC | 132 |
| | pneumoniae | | |
| sAMK702 | Lactobacillus delbrueckii | GGGAGLEDSKSFSLICIGSRVGDGNHSSHKKHHK | 133 |
| | | GKKH | |
| sAMK715 | Streptococcus agalactiae | GVTSKSLCTPGCKTGILMTCAIKTATCGCHFG | 134 |
| sAMK717 | Staphylococcus caprae | GNTSLIWCTPGCAKNL | 135 |
| sAMK720 | Myroides odoratimimus | GHVELMNADKVKCKSTSTTKSCSSTSTTSVD | 136 |
| sAMK725 | Streptococcus sanguinis | GVGSRYLCTPGSCWKWVCFTTTVK | 137 |
| sAMK731 | Streptococcus agalactiae | GAGHGVNTISAECRWNSLQAIFSCC | 138 |
| sAMK732 | Streptococcus agalactiae | GGKNGVFKTISHECHLNTWAFLATCCS | 139 |
| sAMK734 | Eubacterium sp. | GNMVIRARWTITSKCPSSIGHCC | 140 |
| sAMK740 | Dolosigranulum pigrum | GTANTYCRCYSGRHSCGRACTITAECPVFTVACC | 141 |
| sAMK916 | Streptococcus_sp._ | GWQTAFRLTMQGRCGGVFTLSYECATPHVSCG | 142 |
| | M334 | | |
| sAMK917 | Rothia aeria F0474 | GLIYGKYRDVLSGARLVTPPEVALRLVPR | 143 |
| sAMK989 | Enterococcus faecalis | GLWTGKFRDVFGGRALFQVVIYYRLVPR | 144 |
| sAMK995 | Sphingobium | GTSYGESLDATFPDGTPRGELTFSRLVPR | 145 |
| | yanoikuyae | | |
| sAMK1009 | Rothia aeria FO474 | GWLWGSYRDVYGVWHGPRTNFNGAGGSSEWR | 146 |
| | | LVPR | |
| sAMK1010 | Rothia aeria F0474 | GWYWGNRRDIYGALRYANKRLVPR | 147 |

[0587] Based on the large antimicrobial activity dataset, four peptides (AMK-287, 417, 687, and 691) were selected to characterize their activity against clinical isolates of MDR pathogens. SPE-purified peptides from liter scale fermentations were used to profile dose-dependent killing of methicillin-resistant Staphylococcus aureus (MRSA), vancomycin-resistant Enterococcus faecium (VRE), and Streptococcus pneumoniae (FIG. 34). Dose-dependent antimicrobial activity was observed against at least one strain for all four peptides, with AMK-687 demonstrating particularly potent and broad-spectrum antimicrobial activity against all four isolates. Importantly, the clinical isolate of E. faecium was susceptible to these RiPPs despite a normal microbiome-associated E. faecium demonstrating robust growth in the presence of the same peptides (FIG. 33B). AMK-287 demonstrated pronounced activity against Streptococcus pneumoniae, again noteworthy given the narrow spectrum of activity against other strains of Streptococcus in the initial activity fingerprinting assay (FIG. 33B).

### DISCUSSION

[0588] Attempts to address, at a mechanistic level, the dynamics of the microbiome commonly rely on a kind of “forward genetics” approach (start with a phenotype and move toward microbial genetic determinants)¹. Here instead, a group of molecules were systematically assessed to functionally profile them for their potential to shape the microbiome. RiPPs sourced from the human microbiome may hold specific advantages as narrow spectrum antimicrobials for combating MDR pathogens. Traditional antibiotics can exacerbate the evolution of resistance or are causative of disease outright through their broad-spectrum activity disrupting the human microbiome⁵⁴. Lanthipeptides with antimicrobial activity act primarily through targeting the cell envelope⁵⁵, which is an attractive strategy to sidestep resistance mechanisms linked to enzymatic modification and efflux. Cyclic peptide natural products (or mimetics) targeting the bacterial outer envelope are being investigated and studied in clinical trials, including those active against Gram-negative pathogens⁵⁶⁻⁵⁸.

[0589] Several of the molecules discovered here serve as excellent scaffolds for further examining structure-activity relationships of the variable cyclic regions. The 96-well microtiter expression pipeline enables both rapid assessment of biosynthetic constraints for modifying enzyme/peptide pairs and functional assaying against indicator organisms of interest. Modifying enzymes that are associated with multiple substrate peptides can also serve as effective biocatalysts for selections of modified peptides with de novo activity^{25,39}. Cell-free expression approaches, as demonstrated for unmodified bacteriocins⁵⁹, offer a useful method for initial activity testing, but scalable production routes must be considered. Systematic heterologous expression and engineering of RiPP gene clusters (e.g., as provided herein) addresses the production issue and also advances peptides' potential as cell-based effectors in living therapeutics⁶⁰. Emerging technology for the delivery of genetic programs to diverse bacteria^{61,62} coupled with responsive, in situ peptide production to sidestep unfavorable pharmacokinetic properties⁶³ further highlights the therapeutic potential of peptides.

[0590] Semi-purified RiPPs were produced directly from sequence information without downstream assay constraints from as little as 2 mL microwell fermentations. Expression of RiPPs scaled well to liter volumes and methods were established for rapidly purifying and generating screening plates of peptides dissolved in an organic solvent/water mixture. These plates can be frozen, stored, and treated in similar fashion to small molecule libraries, enabling their broad assaying. The enumeration of medium-sized natural products in this format is of particular value since, compared to small molecules, they are under sampled in most natural products screening collections⁶⁴. Medium-sized modalities exhibit greater efficacy in binding 15 to and disrupting non-enzymatic function of macromolecular targets⁶⁵.

[0591] The scale at which RiPP gene clusters were constructed, expressed, and characterized in this study is unprecedented but precludes widespread, in-depth structural characterization. The application of high-resolution tandem mass spectrometry to characterize post-translationally modified peptides, however, is an acceptable level of structural annotation, as evidenced by comparable studies^{9-11, 39-45}. The workflows described here enable discovery, prioritization, and optimization of a limited number of molecules, which can be scaled in production volume for more rigorous structural and functional characterization as appropriate.

[0592] In summary, a platform was developed for streamlined genome mining of RiPP gene clusters. Rapid assessment of modification through 96-well expression, purification, and LC-MS analysis enabled small molecule and novel enzyme discovery. Application of this pipeline toward genome mining of the human microbiome yielded constrained peptides with unique antimicrobial fingerprints when tested against a large subset of strains from the human microbiome. These molecules were shown to be active against MDR bacterial pathogens. Systematic discovery and functional profiling of human microbiome-derived antimicrobials able to selectively target endogenous microflora and pathogens has significant potential for both engineering the microbiome and developing therapeutics to address antimicrobial resistance.

### Methods

### Materials and Methods

[0593] Strains, media, and chemicals. E. coli NEB 10-beta (C3019I, New England BioLabs, Ipswich, Mass., USA) was used for all routine cloning. E. coli NEB Express (C2523I, New England BioLabs, Ipswich, Mass., USA) and E. coli Marionette-X, a Marionette-compatible derivative of NEB Express were used for liter-scale peptide expression experiments. TB (T0311, Teknova, Hollister, Calif., USA) supplemented with 0.4% glycerol (BDH1172-4LP, VWR, OH, USA) was used for peptide expression and modification. 2xYT liquid media (B244020, BD, Franklin Lakes, N.J., USA) and 2xYT+2% agar (B214010, BD, Franklin Lakes, N.J., USA) plates were used for routine cloning and strain maintenance. Other media include Tryptic Soy Broth (TSB; BD211825, BD, Franklin Lakes, N.J., USA), Brain Heart Infusion (BHI; BD237500, BD, Franklin Lakes, N.J., USA),

[0594] Lactobacilli MRS broth (MRS; BD288130, BD, Franklin Lakes, N.J., USA), and Sabouraud Dextrose Broth (SDB; BD288130, BD, Franklin Lakes, N.J., USA). SOB liquid media (S0210, Teknova, Hollister, Calif., USA) was used for making competent cells. SOC liquid media (B9020S, New England BioLabs, Iwsich, Mass., USA) was used for outgrowth. Unless noted otherwise, cells were induced with the following chemicals: cuminic acid (268402, Millipore Sigma, Saint Louis, Mo., USA) added as 1000× stock (200 mM) in EtOH or DMSO; 3-oxohexanoyl-homoserine lactone (3OC6-AHL) (K3007, Millipore Sigma, Saint Louis, Mo., USA) added as a 1000× stock (1 mM) in DMSO; anhydrotetracycline (aTc) (37919, Millipore Sigma, Saint Louis, Mo., USA) added as a 1000× stock (100 μM) in DMSO; isopropyl β-D-1-thiogalactopyranoside (IPTG) (I2481C, Gold Biotechnology, Saint Louis, Mo., USA) added as 1000× stock (1 M) in water; Sodium salicylate (S3007, Millipore Sigma, Saint Louis, Mo., USA), N-(3-Hydroxytetradecanoyl)-DL-homoserine lactone (3OC14-AHL; 51481, Millipore Sigma, Saint Louis, Mo., USA. Cells were selected with the following antibiotics: carbenicillin (carb, C-103-5, Gold Biotechnology, Saint Louis, Mo., USA) added as 1000× stock (100 mg/mL in H2O); kanamycin (kan, K-120-10, Gold Biotechnology, Saint Louis, Mo., USA) as 1000× stock (50 mg/mL in H2O); and spectinomycin (spec, S-140-5, Gold Biotechnology, Saint Louis, Mo., USA). Liquid chromatography was performed with Optima Acetonitrile (A996-4, Thermo Fisher Scientific, MA, USA) and water (Milli-Q Advantage A10, Millipore Sigma, Saint Louis, Mo., USA) supplemented with LCMS Grade Formic Acid (85178, Thermo Fisher Scientific). The following solvents/chemicals were also used: Ethanol (V1001, Decon Labs, King of Prussia, Pa., USA), Methanol (3016-16, Avantor, Center Valley, Pa., USA), Ammonium bicarbonate (A6141 Millipore Sigma, Saint Louis, Mo., USA), dimethyl sulfoxide (DMSO) (32434, Alfa Aesar, Ward Hill, Mass., USA), Imidazole (IX0005, Millipore Sigma, Saint Louis, Mo., USA), sodium chloride (X190, VWR, OH, USA), sodium phosphate monobasic monohydrate (20233, USB Corporation, Cleveland, Ohio, USA), sodium phosphate dibasic anhydrous (204855000, Acros, N.J., USA), guanidine hydrochloride (50950, Millipore Sigma, Saint Louis, Mo., USA), tris (75825, Affymetrix, Cleveland, Ohio, USA), TCEP (51805-45-9, Gold Biotechnology, Saint Louis, Mo., USA), and EDTA (0.5M stock, 15694, USB Corporation, Cleveland, Ohio, USA), dimethyl formamide (A13547, Alfa Aesar, MA, USA), defibrinated sheep blood (R54012, Thermo Fisher Scientific, MA, USA), hemin (51280, Sigma Aldrich), vitamin K1 (V3501, Sigma Aldrich), and L-cysteine (C7532, Sigma Aldrich). DNA oligos and gBlocks were ordered from Integrated DNA Technologies (IDT) (San Francisco, Calif., USA).

[0595] Computational detection and clustering of RiPP gene clusters. Genome datasets for projects “HMP1” and “HMP2” were obtained from the Human Microbiome Project online portal. These 2,229 genomes were used as the database for running AntiSMASH 4.0 using default parameters with ClusterFinder-based border predictions 29. Output from this analysis was analyzed using BiG-SCAPE with distance cut-off filters of 0.2, 0.4, 0.6, 0.8, and 1.0. The resulting similarity network matrices were visualized with Cytoscape and distance cutoff of 0.8 chosen for FIGS. 28A-28D.

[0596] Peptide expression in 96-well plates and purification. Plasmids were transformed into either E. coli NEB Express or E. coli Marionette-X using 30 μL of competent cells and 1 μL of each plasmid being transformed in a PCR strip tubes (1402-4700, USA Scientific, FL, USA or 951020401, Eppendorf, N.Y., USA). Transformations were incubated on ice (20-30 min), heat shocked (42° C., 30 sec), and incubated on ice again (5 min). Cells were then transferred to a deep well 96-well plate (1896-2000, USA Scientific, FL, USA) with 120 μL of SOC. After outgrowth (Multitron Pro, 1 hr, 30° C.) in an Infors HT Multitron Pro (Infors USA, MD, USA), 900 μL LB was added with appropriate antibiotics (at 1.1× for 1× final concentration) and incubated (Multitron Pro, 30° C., 900 r.p.m.) until all wells reached saturation (12-30 hours). Overnight cultures were diluted 1:100 into 1 ml TB in deep well plates. After 3 hours incubation (Multitron Pro, 30° C., 900 r.p.m.), appropriate inducer was added (1 μl IPTG or 1l1 IPTG and 1 μl cumate), and cultures were incubated for 20 hours (Multitron Pro, 30° C., 900 r.p.m.). To purify the peptides, the 96-well plates were centrifuged (Legend XFR, 4,500 g, 4° C., 20 min), pellets were resuspended in 600 μL lysis buffer, and freeze-thawed twice (frozen at −80° C.; thawed in Multitron Pro at 37° C., 900 r.p.m). Cell lysates were centrifuged (Legend XFR, 4,500 g, 4° C., 60 min) and peptides affinity purified using His MultiTrap TALON plates (29-0005-96, GE Life Sciences, Marlborough, Mass., USA), following manufacturer instructions, using 1×600 μL water and 2×600 μL lysis buffer for column equilibration, 2×600 μL wash buffer, and 1×200 μL elution buffer.

[0597] Liter-scale RiPP expression and purification. Glycerol stocks of strains generated from 96-well transformations were used to inoculate 20 mL of LB in a 125 mL shake flask and incubated overnight at 30° C. and 250 rpm in an Innova44 (Eppendorf, N.Y., USA). A 5 mL aliquot of overnight starter culture was diluted in 500 mL total volume TB with carb/spec in Fernbach flasks and grown at 30° C. and 250 rpm until reaching OD600 0.8-1.0, at which point 1 mM IPTG and 200 μM cumate are added. Induced cultures were grown for a further 20 h at 18° C. and 250 rpm and then centrifuged (4,000 g, 4° C., 10 min) in a Sorvall RC 6+ centrifuge (Thermo Fisher Scientific, MA, USA). Pellets were resuspended in 30 mL lysis buffer (5 M guanidinium hydrochloride, 300 mM NaCl, 10 mM imidazole, 50 mM sodium phosphate, pH 7.5), and freeze-thawed twice (frozen in −80° C. freezer; thawed in innova44 incubator at 30° C., 250 rpm). Cell lysates were centrifuged (20,000 g, 12° C., 45 min) and the peptides affinity purified via gravity-flow using 3 mL resin-bed volume of Ni-NTA agarose resin (88223, Thermo Fisher Scientific, MA, USA), following manufacturer instructions, using 2 resin-bed volumes water and lysis buffer for column equilibration, 4 resin-bed volumes of wash buffer (5 M guanidinium hydrochloride, 300 mM NaCl, 25 mM imidazole, 50 mM sodium phosphate, pH 7.5), 4 resin-bed volumes of elution buffer buffer (5 M guanidinium hydrochloride, 300 mM NaCl, 250 mM imidazole, 50 mM sodium phosphate, pH 7.5). Eluates were diluted to 30 mL with lysis buffer, transferred to Spectra/Por 3 RC Dialysis Membrane Tubing 3500 Dalton MWCO (132725, Spectrum, CA, USA) and dialyzed overnight at room temperature in 1× phosphate buffered saline (PBS; 6505-4L, CalBiochem, CA, USA). Dialyzed solutions were centrifuged (4,000 g, 4° C., 10 min) to remove any precipitate. To cleave the SUMO and leader peptide from the core, TCEP (1 mM final concentration) and 3 mg of TEV protease (30 mg lyophilizate, Gene and Cell Technologies, CA, USA) were added and tubes incubated overnight at room temperature with slow orbital shaking. Cleaved peptide solutions were centrifuged (4,000 g, 4° C., 10 min) to remove any precipitate and then desalted using a Strata-X PRO 500 mg SPE tube (8B-S536-HCH, Phenomenex, CA, USA). The solid phase was first conditioned with 4 bed volumes of methanol and then water. Eluate was then loaded, washed with 8 bed volumes of water, and eluted with 8 bed volumes of 1:1 acetonitrile:water+0.1% formic acid. Solvent was removed via lyophilization at −80 C for 24-48 hours.

[0598] Liquid chromatography/mass spectrometry. All chromatography was performed using mobile phases ACN (acetonitrile supplemented with 0.1% formic acid and 0.1% water) and water (supplemented with 0.1% formic acid). LC-MS was performed on one of two mass spectrometers: “QQQ” is an Agilent 1260 Infinity liquid chromatograph with binary pump configured in low-dwell volume mode, high-performance autosampler chilled to 18° C., and column oven, coupled to an Agilent 6420 QQQ mass spectrometer equipped with an Agilent electrospray ionization (ESI) source; nitrogen gas is supplied by a Parker Nitroflowlab and ESI source parameters are 350° C. gas temp at 12 L/min flow rate, 15 psi nebulizer voltage, 4000 V capillary voltage, 135 V fragmentor voltage, and 7 V cell accelerator voltage. “qTOF” is an Agilent 1260 Infinity II liquid chromatograph with binary pump configured in low-dwell volume mode and column oven set to 40° C., coupled to an Agilent 6545 qTOF mass spectrometer equipped with an Agilent electrospray ionization (ESI) source; nitrogen gas is building supplied and ESI source parameters are 350° C. gas temperature, 12 L/min gas flow, 30 psig nebulizer pressure, 350° C. sheath gas temperature, 8 L/min sheath gas flow, 3000 V capillary voltage, 1000 V nozzle voltage, 135 V fragmentor voltage, 15 V skimmer voltage, 600 V Oct 1 RF Vpp; the mass spectrometer was run in MS mode with reference mass enabled and tuned in positive mode with standard mass range (3200 m/z) and 2 GHz extended dynamic range. When using the QQQ, analysis was done with a Phenomenex Aeris PEPTIDE XB-C18 2.6 □m 50 mm×2.1 mm column with column oven set to 40° C. Flow rate was 0.6 ml/min. Gradient was 10% ACN for 0.5 min, 10% to 60% ACN over 6 min, 60% to 90% ACN over 1 min, 90% ACN for 1 min, with 1 min re-equilibration. The mass spectrometer was run in positive mode, 500-2000 m/z range with a 300 ms scan time. Injections were 5 □L (as a starting point, injection volumes were occasionally adjusted depending on the yield of the 96-well prep). When using the qTOF, analysis was done with a Phenomenex Aeris PEPTIDE XB-C18 2.6 □m 50 mm×2.1 mm column. Flow rate was set at 0.5 ml/min. The flow rate was set at 0.5 mL/min and 5 μL sample was injected. The gradient used was 10% ACN for 1.0 min, 10% to 70% ACN over 5.0 min, 70% to 90% ACN over 0.5 minutes, 90% ACN for 1.0 min, with 1.0 min re-equilibration. Injections were 5 μL (as a starting point, injection volumes were occasionally adjusted depending on the yield of the 96-well prep).

[0599] Peptide screening plate prep. Lyophilized liter-scale preps were resuspended in 540 μL DMF and vortexed for 5 seconds. To this was added 3060 μL of H2O and the mixture was vortexed for 5 seconds to make a solution of peptide in 15% DMF. All mixtures were centrifuged (Legend XFR, 4,000 g, 4° C., 10 min) to remove any insoluble material and then split into 2 96-well 2 mL plates. From this, 12 μL of each peptide was aliquoted into 290 96-well screening plates (3788, Corning), which were then used for downstream LC-MS/MS analysis and functional assay screening. Plates were covered and kept at −20° C. for up to one year.

[0600] LC-MS/MS data acquisition. All chromatography was performed using the mobile phases ACN (acetonitrile supplemented with 0.1% formic acid and 0.1% water) and water (supplemented with 0.1% formic acid). MS/MS data were acquired on an Agilent 1260 Infinity II liquid chromatograph with binary pump configured in low-dwell volume mode and column oven set to 40° C., coupled to an Agilent 6545 qTOF mass spectrometer equipped with an Agilent electrospray ionization (ESI) source. Nitrogen gas is building-supplied and ESI source parameters are 350° C. gas temperature, 12 L/min gas flow, 30 psig nebulizer pressure, 350° C. sheath gas temperature, 8 L/min sheath gas flow, 3000 V capillary voltage, 1000 V nozzle voltage, 135 V fragmentor voltage, 15 V skimmer voltage, 600 V Oct 1 RF Vpp; the mass spectrometer was run in MS mode with reference mass enabled and tuned in positive mode with standard mass range (3200 m/z) and 2 GHz extended dynamic range. For this analysis, 4 peptide screening plates were thawed and resuspended in a total of 100 □L PBS/DMF mixture. To this mixture, TCEP was added to a final concentration of 1 mM. Samples were split in two and NEM (12.5 mM final concentration) was added to one group of samples to label free cysteine residues. For the targeted MS/MS, 4 spectra/s were sampled with fixed collision energies of 30, 45, 60, and 75 V. A narrow isolation width (1.3 m/z) and observed monoisotopic mass (exact masses found in Supplementary Fig. xx) was used for fragmentation of each peptide. Sample analysis was performed with a Phenomenex Aeris PEPTIDE XB-C18 2.6 □m 50 mm×2.1 mm column. The flow rate was set at 0.5 mL/min and 5 □L sample was injected. The gradient used was 10% ACN for 1.0 min, 10% to 70% ACN over 5.0 min, 70% to 90% ACN over 0.5 minutes, 90% ACN for 1.0 min, with 1.0 min re-equilibration. Accurate mass predictions of peptides were generated using the online resource, ChemCalc 68. Indicator strain growth. Indicator strains were grown using the annotated media. The following specialized media mixtures were used: TSB supplemented with 5% defibrinated sheep blood (TSBb) and BHI supplemented with hemin, vitamin K1, and L-cysteine (BHIs). To make BHIs, 10 mL of hemin solution (50 mg hemin, 1 mL 1 N NaOH, 100 mL H2O, filter sterilized) and 200 μL of diluted vitamin K1 solution (150 μL vitamin K1 solution, 30 mL 95% ethanol, filter sterilized) were added to sterile 1 L sterile BHI supplemented with 0.5 g L-cysteine. Agar plates of all media types were generated by addition of 2% agar. For strains sourced from OpenBiome and individual labs, strains were first purified by streaking on agar media plates. For strains sourced from ATCC and CDC, product protocols were followed to activate lyophilizates and strains were grown on agar plates of the annotated media type. All strains were grown on solid media until uniform colonies were observed. Individual colonies were used to inoculate sterile 96-well microtiter plates of the corresponding media type. Once wells reached sufficient density (24-72 hours of growth, see additional culturing conditions below), liquid glycerol stocks were generated by the addition of 500 μL culture and 500 μL 50% glycerol. Multiple glycerol stock plates were generated and frozen at −80° C. for subsequent assaying described below.

[0601] Antimicrobial assays. All materials were additionally sterilized by exposure to UV light for 10 minutes in laminar flow cabinet. Glycerol stocks of microbiome strains were subcultured in liquid media. Strains were grown for 24-48 hours, diluted 1:200 into fresh media, and 100 μL added to thawed peptide screening plates previously generated. Compounds were aliquoted in wells C1-E12 with wells B1-B12 and F1-F12 containing 15% DMF controls. Additional media was added to wells surrounding the assay wells to mitigate evaporation. All growth plates contained wells B1-B12 with a no growth control (15% DMF plus 100 μL media) and wells F1-F12 with a growth control (15% DMF plus 100 μL diluted culture). Plates were manually inspected for sufficient control growth after 24 or 48 hours and optical density measured using a The OD600 was measured using a Synergy H1 Hybrid Reader (8041000, BioTek). Automated plate shaking was found to be insufficient to break up pellets formed by some strains and therefore all pellets were manually broken up by mild pipetting with care taken to not introduce bubbles. Residual growth was calculated by measuring the OD600 of all plate wells. All measurements were done in triplicate on three separate days. Dilution series experiments were performed as above with new compound preps. Compounds were mixed with media at 4× the final concentration. Serial two-fold dilutions into the same media composition generated a compound dilution series at 2× the final assay concentration. Diluted indicator cultures were added 1:1 to this mixture to generate a 1× compound concentration in all wells.

### REFERENCES FOR EXAMPLE 6

[0602] 1 Fischbach, M. A. Cell 174, 785-790, doi:10.1016/j.cell.2018.07.038 (2018).
[0603] 2 Kenny, D. J. & Balskus, E. P. Chem. Soc. Rev., doi:10.1039/c7cs00664k (2017).
[0604] 3 Medema, M. H. Nat. Prod. Rep. 38, 301-306, doi:10.1039/dOnp00090f (2021).
[0605] 4 Zhang, J. J., et al., Nat. Prod. Rep. 36, 1313-1332, doi:10.1039/c9np00025a (2019).
[0606] 5 Arnison, P. G. et al. Nat. Prod. Rep. 30, 108-160, doi:10.1039/C2NP20085F (2013).
[0607] 6 Donia, M. S. et al. Cell 158, 1402-1414, doi:10.1016/j.cell.2014.08.032 (2014).
[0608] 7 Montalbán-López, M. et al. Nat. Prod. Rep., doi:10.1039/dOnp00027b (2020).
[0609] 8 Pinho-Ribeiro, F. A. et al. Cell 173, 1083-1097.e1022, doi:10.1016/j.cell.2018.04.006 (2018).
[0610] 9 Duan, Y. et al. Nature, doi:10.1038/s41586-019-1742-x (2019).
[0611] 10 Sassone-Corsi, M. et al. Nature, doi:10.1038/nature20557 (2016).
[0612] 11 Nakatsuji, T. et al. Sci. Transl. Med. 9, doi:10.1126/scitranslmed.aah4680 (2017).
[0613] 12 Kim, S. G. et al. Nature, 1-5, doi:10.1038/s41586-019-1501-z (2019).
[0614] 13 Claesen, J. et al. Sci. Transl. Med. 12, doi:10.1126/scitranslmed.aay5445 (2020).
[0615] 14 Ongey, E. L. & Neubauer, P. Microb. Cell Fact. 15, 97, doi:10.1186/s12934-016-0502-y (2016).
[0616] 15 Hegemann, J. D., et al., Acc. Chem. Res. 48, 1909-1919, doi:10.1021/acs.accounts.5b00156 (2015).
[0617] 16 Merwin, N. J. et al. Proc. Natl. Acad. Sci. U.S.A, doi:10.1073/pnas.1901493116 (2019).
[0618] 17 Tietz, J. I. et al. Nat. Chem. Biol., doi:10.1038/nchembio.2319 (2017).
[0619] 18 Santos-Aberturas, J. et al. Nucleic Acids Res. 47, 4624-4637, doi:10.1093/nar/gkz192 (2019).
[0620] 19 Mohimani, H. et al. ACS Chem. Biol. 9, 1545-1551, doi:10.1021/cb500199h (2014).
[0621] 20 Hudson, G. A. et al. J. Am. Chem. Soc., doi:10.1021/jacs.9b01519 (2019).
[0622] 21 Schwalen, C. J., et al., J. Am. Chem. Soc., doi:10.1021/jacs.8b03896 (2018).
[0623] 22 Pan, S. J., et al., Protein Expr. Purif. 71, 200-206, doi:10.1016/j.pep.2009.12.010 (2010).
[0624] 23 Tran, H. L. et al. J. Am. Chem. Soc., doi:10.1021/jacs.6b10792 (2017).
[0625] 24 Schmitt, S. et al. Nat. Chem. Biol., 1, doi:10.1038/s41589-019-0250-5 (2019).
[0626] 25 Yang, X. et al. Nat. Chem. Biol. 14, 375-380, doi:10.1038/s41589-018-0008-5 (2018).
[0627] 26 Si, T. et al. J. Am. Chem. Soc., doi:10.1021/jacs.8b05544 (2018).
[0628] 27 Hetrick, K. J., et al., ACS Cent Sci 4, 458-467, doi:10.1021/acscentsci.7b00581 (2018).
[0629] 28 Urban, J. H. et al. Nat. Commun. 8, 1500, doi:10.1038/s41467-017-01413-7 (2017).
[0630] 29 Blin, K. et al. Nucleic Acids Res., doi:10.1093/nar/gkx319 (2017).
[0631] 30 Lloyd-Price, J. et al. Nature 550, 61-66, doi:10.1038/nature23889 (2017).
[0632] 31 Navarro-Munoz, J. C. et al. Nat. Chem. Biol. 16, 60-68, doi:10.1038/s41589-019-0400-9 (2020).
[0633] 32 Cimermancic, P. et al. Cell 158, 412-421, doi:10.1016/j.cell.2014.06.034 (2014).
[0634] 33 Maglangit, F., et al., Nat Prod Rep 38, 782-821, doi:10.1039/dOnp00061b (2021).
[0635] 34 Potter, L. R. Pharmacol Ther 130, 71-82, doi:10.1016/j.pharmthera.2010.12.005 (2011).
[0636] 35 Funk, M. A. & van der Donk, Acc. Chem. Res. 50, 1577-1586, doi:10.1021/acs.accounts.7b00175 (2017).
[0637] 36 Meyer, A. J., et al., Nat. Chem. Biol., doi:10.1038/s41589-018-0168-3 (2018).
[0638] 37 Glassey, E., et al., ACS Synth. Biol. (2020).
[0639] 38 Zhang, Q. et al. Proc. Natl. Acad. Sci. U.S.A 111, 12031-12036, doi:10.1073/pnas.1406418111 (2014).
[0640] 39 Hegemann, J. D., et al., ACS Synth. Biol., doi:10.1021/acssynbio.9b00080 (2019).
[0641] 40 DiCaprio, A. J., et al., J. Am. Chem. Soc. 141, 290-297, doi:10.1021/jacs.8b09928 (2019).
[0642] 41 Bosch, N. M. et al. Angew Chem Int Ed Engl 59, 11763-11768, doi:10.1002/anie.201916321 (2020).
[0643] 42 Huo, L., Appl. Environ. Microbiol. 83, doi:10.1128/AEM.02698-16 (2017).
[0644] 43 McClerren, A. L. et al. Proc. Natl. Acad. Sci. U.S.A 103, 17243-17248, doi:10.1073/pnas.0606088103 (2006).
[0645] 44 Zong, C., et al., Chem. Commun. 54, 1339-1342, doi:10.1039/c7cc08620b (2018).
[0646] 45 Bobeica, S. C. & van der Donk, W. A. Methods Enzymol. 604, 165-203, doi:10.1016/bs.mie.2018.01.038 (2018).
[0647] 46 Spinelli, S. L., et al., J Biol Chem 274, 2637-2644, doi:10.1074/jbc.274.5.2637 (1999).
[0648] 47 Ortega, M. A. et al. Nature 517, 509-512, doi:10.1038/nature13888 (2014).
[0649] 48 Hudson, G. A., et al., J. Am. Chem. Soc. 137, 16012-16015, doi:10.1021/jacs.5b10194 (2015).
[0650] 49 Li, B. et al. Int J Oral Sci 11, 10, doi:10.1038/s41368-018-0043-9 (2019).
[0651] 50 Duranti, S. et al. Sci Rep 10, 14112, doi:10.1038/s41598-020-70986-z (2020).
[0652] 51 Xu, P. et al. J Bacteriol 189, 3166-3175, doi:10.1128/JB.01808-06 (2007).
[0653] 52 Diop, K., et al., Human Microbiome Journal 11, 100051, doi:10.1016/j.humic.2018.11.002 (2019).
[0654] 53 Petrova, M. I., et al., Trends Microbiol. 25, 182-191, doi:10.1016/j.tim.2016.11.007 (2017).
[0655] 54 Abt, M. C., et al., Nature Publishing Group 14, 609-620, doi:10.1038/nrmicro.2016.108 (2016).
[0656] 55 McAuliffe, O., et al., FEMS Microbiol. Rev. 25, 285-308, doi:10.1111/j.1574-6976.2001.tb00579.x (2001).
[0657] 56 Imai, Y. et al. Nature, doi:10.1038/s41586-019-1791-1 (2019).
[0658] 57 Maffioli, S. I., et al., J. Ind. Microbiol. Biotechnol. 43, 177-184, doi:10.1007/s10295-015-1703-9 (2016).
[0659] 58 MacNair, C. R., et al., Ann. N. Y. Acad. Sci., doi:10.1111/nyas.14280 (2019).
[0660] 59 Gabant, P. & Borrero, J. Front Bioeng Biotechnol 7, 213, doi:10.3389/fbioe.2019.00213 (2019).
[0661] 60 Riglar, D. T. & Silver, P. A. Nat. Rev. Microbiol. 16, 214-225, doi:10.1038/nrmicro.2017.172 (2018).
[0662] 61 Brophy, J. A. N. et al. Nat Microbiol, doi:10.1038/s41564-018-0216-5 (2018).
[0663] 62 Ronda, C., et al., Nat. Methods 16, 167-170, doi:10.1038/s41592-018-0301-y (2019).
[0664] 63 LaMarche, M. J. et al. J. Med. Chem. 59, 6920-6928, doi:10.1021/acs.jmedchem.6b00726 (2016).
[0665] 64 Harvey, A. L., Nat. Rev. Drug Discov. 14, 111-129, doi:10.1038/nrd4510 (2015).
[0666] 65 Valeur, E. et al. Angew. Chem. Int. Ed Engl., doi:10.1002/anie.201611914 (2017).
[0667] 66 Piewngam, P. et al. Nature, 1, doi:10.1038/s41586-018-0616-y (2018).
[0668] 67 Huerta-Cepas, J., et al., Mol Biol Evol 33, 1635-1638, doi:10.1093/molbev/msw046 (2016).
[0669] 68 Patiny, L. & Borel, A. J Chem Inf Model 53, 1223-1228, doi:10.1021/ci300563h (2013).

### Example 7: Combining Enzymes to Multiply Modify Peptides

[0670] Combining peptide sequence constraints for peptide-modifying enzymes, such as those identified through methods described in the previous examples and shown in FIG. 36, offers the attractive possibility of incorporating multiple distinct modifications into a peptide library, increasing diversity of peptides that can be generated and the flexibility of options available for designing features into a library.

[0671] As a proof of principle, the modification patterns of three enzymes were combined and analyzed to develop core and leader sequence motifs. As shown in FIG. 37A, incorporating multiple distinct recognition sites (RSs) into the leader sequence of a peptide and utilizing the corresponding enzymes, as well as incorporating design limitations based on tailoring enzymes, can allow the incorporation of combinations of modifications into a peptide that are not constrained by a given native BGC. As an example, combining the design rules for LynD, PlpXY, and ThcoK modifying enzymes allows for the generation of an amino acid sequence motif that is able to be modified by three distinct enzymes, a library of such peptides can be produced and combined with the respective modification enzymes, and candidate peptides for a given function (e.g., binding to a particular target protein) can be identified (FIG. 37B). The core sequence constraints identified for these three enzymes were combined to design a motif of allowable amino acids forming the range of options for core sequences that can be modified by the particular combination of three enzymes (FIG. 37C). Similarly, the recognition sites for the two leader-dependent enzymes were analyzed, and an array of chimeric leaders were generated by varying the positioning and overlap of the two RSs and scoring each output (FIG. 37D).

[0672] After analyzing the core and leader sequence variant possibilities, a chimeric leader and hybrid core motif were identified combining the options for LynD, PlpXY, and ThcoK modifications (FIG. 37E). The resulting motif provides 11,520 possible peptide sequences. This informed design strategy enables the generation of libraries of this order of magnitude which can be screened, whereas absent the incorporation of design limitations based on the selected modifying enzymes, screening a library of unconstrained peptides of the same length would be infeasible, as there would be 20¹³ or roughly 10¹⁶ possible options—a library which would be impossible to screen using any available techniques. To the contrary, the rationally designed library of ˜10⁴ peptides was able to be screened using the methods provided here, thereby enabling the identification of candidates with the desired modification patterns. The hybrid motif was encoded as a degenerate library, and 11 library members were isolated (FIG. 37F). Certain of the library members included amino acids that theoretically were not allowed based on the hybrid motif (shaded in FIG. 37F), as a result of the degenerate codons that were used to encode certain amino acid positions.

[0673] Similar methods were applied to additional combinations of modification enzymes: (a) ThcoK and LynD; (b) PadeK and LynD; (c) LynD and LasF; (d) PalS, PlpXY and PadeK; (e) LasF and PalS; (f) PlpXY, ThcoK and LynD; (g) PadeK and PalS; and (h) ThcoK and PalS. A selection of peptides were identified for these combinations (FIG. 38).

### Example 8: Functional Expression of Diverse Post-Translational Peptide-Modifying Enzymes in E. coli

[0674] RiPPs (ribosomally-synthesized and post-translationally modified peptides) are a class of pharmaceutically-relevant natural products expressed as precursor peptides before being enzymatically processed into their final functional forms. Bioinformatic methods have illuminated hundreds of thousands of RiPP enzymes in sequence databases and the number of characterized chemical modifications is growing rapidly; however, it has proven difficult to functionally express them in a heterologous host. A major challenge is peptide stability, which is addressed in this Example by design of a RiPP stabilization tag (RST) based on a small ubiquitin-like modifier (SUMO) domain that can be fused to the N- or C-terminus of the precursor peptide and proteolytically removed after modification. This is demonstrated to stabilize a set of eight RiPPs representative of diverse phyla without interfering with the activity of associated modifying enzymes. Further, using Escherichia coli for heterologous expression, a common set of media and growth conditions were identified in which 24 modifying enzymes, representative of diverse chemistries, were shown to be functional. The high success rate and broad applicability of this system enables RiPP discovery through high-throughput “mining” as well as retrosynthesis through the artificial combination of enzymes from different pathways to create a desired non-natural peptide.

### INTRODUCTION

[0675] Metagenomics has led to a deluge of microbial genomes, leading to high-throughput efforts to “mine” the molecules made by organisms by rebuilding pathways and screening for functions-of-interest[1-3]. Because these genes are gleaned from sequence databases, the organism or genomic DNA may not be available, thus necessitating the use of DNA synthesis and a heterologous host to obtain the chemical product[4-6]. RiPPs (ribosomally-synthesized and post-translationally modified peptides) are a potentially rich source of functional diversity that are encoded in gene clusters as a precursor peptide that is enzymatically modified before being proteolytically released[7-14]. Because the peptidic product is made by the ribosome, rather than by a large megasynthase, the probability of successful heterologous expression was determined to be high. However, expressed peptides are often unstable in vivo, and post-translational modifying enzymes may not function in new contexts[15-17]. As a result, only a small fraction of the thousands of known RiPP pathways have been explored[13].

[0676] RiPPs are classified by the chemical modifications made to the peptide. Some are defined by cyclization chemistry, including lanthipeptides (lanthionine macrocyclizations), thiopeptides ((4+2) cycloaddition of dehydrated serine/threonine), lasso peptides (N-terminal macrocyclization with asp/glu), graspetides (lactone/lactam macrocyclizations), bottromycin (macrolactamidine macrocyclization), ranthipeptides (Non-Cα thioether macrocyclizations), pantocins (glutamate crosslink), and sactipeptides (sactionine macrocyclizations)[7, 14]. Others are defined by individual modifications, like glycocins (side chain glycosylation), microcin C (aminoacyl adenylation or cytidylation), comX (indole cyclization and prenylation), sulfatyrotide (tyrosine sulfation), spliceotide (β-amino acids from backbone splicing), and cyanobactins (N-terminal proteolysis). Precursor peptide organization varies between RiPP classes. Modifying enzymes can either bind to a leader/follower sequence in the precursor peptide or directly modify the core. The core consists of 2 to over 50 amino acids and there can be multiple cores in one precursor peptide[17-20]. Leader peptides range from 7 to over 80 amino acids and can recruit multiple modifying enzymes that can have overlapping binding sequences[21-23]. The diversity in chemistry and genetic encoding complicates the creation of general engineering tools that can be systematically used for mining efforts across RiPP classes.

[0677] Tools have been developed to aid heterologous production, including multi-plasmid inducible systems and exploration of E. coli, various Streptomyces strains, and Microvirgula aerodentrificans as expression hosts[17, 30-33]. In vitro methods have also been used to engineer production of new molecules or study biosynthesis[34-37]. Gene cluster regulation may not function properly in a new host. To overcome this, the precursor peptide and modifying enzymes can be cloned and expressed separately[17, 33]. However, precursor peptides have been observed to often be unstable due to host proteases, thus necessitating the use of stabilization tags[15, 16, 24]. Large tags must be removed before peptide modifications can be observed by mass spectrometry, such as in the case of maltose binding protein (MBP, 45 kD), green fluorescent protein (GFP, 27 kD) and glutathione-S-transferase (GST, 26 kD)[38]. In contrast, the small ubiquitin-like modifier tag (SUMO, 12 kD) is smaller, thus allowing modifications to be observed prior to its removal. Further, it can be removed using SUMO protease immediately after purification without desalting[39], which simplifies its use in high-throughput formats. SUMO has been used for expression of both eukaryotic and prokaryotic antimicrobial peptides in E. coli [40-42] as well as a post-translationally modified lanthipeptide from Lactococcus[43] and a xenorceptide from Xenorhabdus[44].

[0678] Here, a RiPP Stabilization Tag (RST) was developed. The RST is a SUMO-based tag for high-throughput RiPP production and was demonstrated to work with diverse classes and modifying enzymes. Versions were made for fusion to the N- or C-terminus of the precursor peptide. Each version contains a HIS6 tag to enable purification in 96-well format. TEV and thrombin protease cleavage sites were included for the N- and C-terminal versions, respectively. Optimized E. coli inducible systems[45] were used to express tagged precursor peptides and modifying enzymes from separate plasmids. The ability for the RST to stabilize the peptide was validated by testing precursor peptides from 9 RiPP classes. As an example, it was demonstrated that the B. halodurans antibiotic peptide haloduracin A1/A2 can be expressed in E. coli and completely modified while attached to the RST, and further that the peptide is functional upon proteolytic cleavage of the RST. Fifty (50) precursor peptides were tested with 47 modifying enzymes and 39 peptides were identified that were expressed as RST fusions, and 24 were identified that were able to be modified with the RST attached. This Example demonstrates the broad applicability of the RST tag for high-throughput mining efforts that span RiPP classes and modifying enzyme chemistries. In addition, these enzymes were all expressed in the same heterologous host (E. coli) under uniform culture conditions and induction times. This provides a roadmap for selecting those enzymes that can be artificially combined to build retrosynthetic pathways for producing non-natural RiPP molecules with desired properties.

### Results

### Expression System for Modified Peptides

[0679] Two versions of the RiPP stabilization tag (RST) were designed to allow fusion to either the N- or C-terminus (termed RST_{N} and RST_{C}, respectively) of a precursor peptide (FIG. 39 and FIG. 40A). In most instances in this Example, the N-terminal version was used. The C-terminal version is a useful alternative either when there is a modification at the N-terminus, or when the leader peptide is removed during modification. For purification, a HIS6 tag was placed at the terminus of the RST. A linker sequence was designed to connect SUMO to the precursor peptide, adapted from a recombinant protein expression system[46]. The linkers were built to include cleavage sites for orthogonal proteases: TEV (for RST_{N}) or Thrombin (for RST_{C}). The RST was designed such that it can be removed using either TEV/Thrombin or SUMO protease (for RST_{N}). Treatment of RST_{N}-tagged peptides with TEV leaves a GC scar at the N-terminus, where the cysteine is included to allow SAMDI (self-assembled monolayers on gold for matrix-assisted laser desorption/ionization) mass spectroscopy[47, 48].

[0680] A two-plasmid system was used to separately express the precursor peptide and modifying enzyme, thus enabling combinations to be tested rapidly through co-transformations (FIG. 40B). The inducible system for the precursor peptide was selected to maximize its expression. To this end, the IPTG-inducible PT5LacO promoter[45] was used and a strong ribosome binding site (RBS) designed using the RBS Calculator[49, 50]. For the modifying enzyme, the cumate-inducible P_{CymR*} or ahl-inducible P_{LuxB} plasmids were used because of their high dynamic range (low off and high on)[45]. A different RBS was calculated for each modifying enzyme to maximize the probability of successful expression and to bias toward similar expression levels. When expressing RSTC-fused peptide, a small N-terminal region of the RSTN tag (FIG. 40A) was used to keep the RBS strength (and associated expression level) relatively constant across different precursor peptides.

[0681] Expression and purification protocols were first developed for low-throughput growth in 250 ml flasks in LB media. The tagged precursor peptide and modifying enzyme were induced simultaneously. After induction with 1 mM IPTG and 200 μM cumate (for P_{CymR*}) or 10 μM 3OC6-AHL (for P_{LuxB}), cultures were grown at 18° C. for 20 hours with shaking. Then, the peptide was purified using immobilized metal affinity chromatography (IMAC) and analyzed using LC-MS.

[0682] An example of the production of a modified peptide in flasks is shown in FIG. 40C using a variant of the trunkamide precursor peptide (TruE*) and cognate modifying enzyme TruD. Two samples were prepared: (1) the TruE* peptide expressed using a first-generation version of RST_{N} (RST_{N}*) co-transformed with the plasmid containing P_{LuxB}-controlled truD (pEG1128); and (2) the TruE* peptide expressed as an MBP fusion, also co-transformed with pEG1128. From the LC-MS spectra, the observed mass for each of the peptides, as well as the expected error given the resolution of the mass spectrometer were calculated. TruD catalyzes the formation of a thiazole from cysteine, causing a loss of water and a corresponding mass shift of −18 Da. The larger MBP obfuscated the observation of this expected mass shift because it is equal to the standard deviation of the measurement (18 Da). In contrast, the standard deviation of the RST_{N} fusion is 6 Da and the expected and observed mass matched (FIG. 40C). Therefore, it was concluded that the mass shift that occurs due to post-translational modification could be observed without removing the RST, even using a low-resolution quadrupole mass spectrometer.

[0683] Next, RST stabilization of diverse precursor peptides across RiPP classes was tested (FIG. 41). The following examples from each class were selected: microviridin L from graspetides, bottromycin from bottromycins, streptide from streptides, PQQ from pyrroloquinoline quinones, subtilosin A from sactipeptides, trifolitoxin from linear azole peptides, prochlorosin from lanthipeptides, thiomuracin from thiopeptides, and pheganomycin from guanidinotides (peptides described in [14, 20, 29, 51-57]). This set encompasses a wide range of lengths, amino acid compositions, number of modifying enzyme binding sites, N- and C-terminal leaders/followers, and pheganomycin has two cores.

[0684] The ability for RST_{N}* to stabilize the unmodified peptides was tested. Expression was measured in the absence of modifying enzymes to account for any stabilization affect that arises from peptide modification. Expression and purification were performed at the 250 mL flask scale, as described above. First, precursor peptide expression when fused only to a N-terminal HIS6 tag was evaluated. This tag led to only three of nine peptides being detected by LC-MS (FIG. 41). Trifolitoxin was also detected, but it was cleaved in E. coli, resulting in a truncated peptide. In contrast, when the precursor peptides were fused to RST_{N}*, large peaks appeared for all of the peptides. These peaks corresponded to the expected masses, except for trifolitoxin and subtilosin A, the latter of which is cleaved in the leader.

### Production of Active Haloduracin

[0685] Next, the production of a biologically-active product was evaluated using the expression system provided herein. Modifications were directed at an RST-fused peptide, after which the tag was cleaved and the activity of the product tested. Haloduracin was selected, a two-component lanthipeptide that had previously been expressed and purified from E. coli and shown to have antibiotic activity[34]. Genes encoding haloduracin A1 and haloduracin A2 peptides fused to RST_{N} were synthesized, as were genes encoding corresponding HalM1 and HalM2 modifying enzymes from Bacillus subtilis (FIGS. 42A-42F). An additional TEV protease cleavage site was added between the leader and core regions of the precursor peptide (FIG. 42A) to allow the core to be cleaved and recovered as an active product (FIG. 42B). Such cleavage leaves a single N-terminal glycine on the released core sequence. The peptide-enzyme genes were cloned into the two-plasmid system (FIG. 40B) and transformed as pairs into E. coli NEB Express.

[0686] A high-throughput 96-well system for expression and purification was developed, which was tested using haloduracin. Cultures were grown in 2 mL of TB media in deep well plates (two 1 mL wells for each peptide), where they are each induced with 1 mM IPTG/200 μM cumate for 20 hours at 30° C. with shaking. The cells were lysed, affinity-purified and desalted using solid phase extraction, all in 96-well format. Then, the samples were treated with TEV protease to remove RST_{N} and the leader peptide, and desalted again to concentrate the core peptide (FIG. 42D). The presence of the cleaved cores was verified by LC-MS (FIG. 42D) and LC-MS/MS to confirm that SUMO did not disrupt or alter the lanthionine macrocyclizations present in both molecules (FIG. 42E). For both, the predicted structures were in close agreement with previous reports ([34, 58, 59]). For HalA2, seven of eight Ser/Thr residues were dehydrated and assignment of the single unmodified residue was previously localized to Thr18, Thr22, or Ser23 [34, 58, 59]. A low abundance fragment was observed, suggesting the presence of a dehydrated Ser23, in contrast to a previous report wherein mutation of Ser23 to Ala did not affect the overall number of dehydrations observed [58].

[0687] To assay for antimicrobial activity, the cleaved and desalted core peptides were resuspended in 50 μL 1:1 methanol:water. Bacillus subtilis PY79 was used as indicator strain and was spread on a LB-agar surface, on which 5 μL of either or both haloduracins or a solvent control was added. Individually, the haloduracin peptides showed limited activity (FIG. 42F, left two panels), but combined they formed a clear halo of growth inhibition (FIG. 42F, rightmost panel), indicating that both peptides were properly modified and cyclized. The solvent control showed no effect on bacterial growth.

### High-Throughput Assay of Diverse Modifying Enzymes

[0688] A set of 47 modifying enzymes and their cognate 50 precursor peptides was collated from the literature. The complete list of pathways and enzymes is provided in Table 13 and Table 14, and the subset ultimately found to be active in this Example is provided in Table 15. The selected modifying enzymes are representative of 13 bacterial RiPP classes from diverse genera and catalyze 22 different chemical transformations, including glycosylation, radical carbon-carbon bond focpation and cysteine heterocyclization. The precursor peptide and modifying enzyme genes were codon optimized for E. coli and synthesized, or amplified when the source DNA was available, and cloned into the two-plasmid system. The precursor peptides were tagged with RST_{N}, except for macrocyclization of lasso peptides, which were fused to RST_{C}. The plasmids containing the modifying enzymes and precursor peptides were co-transformed into E. coli NEB Express.

TABLE 13
Modification enzymes

| | Cluster | | | |
|---|---|---|---|---|
| RiPP Class | Name | Molecule Name(s) | Producing organism | Biological Activity |
| Lasso-peptide | Las | lassomycin | Lentzea kentuckyensis | Antibiotic |
| | Cap | capistruin | Burkholderia thailandensis E264 | Antibiotic |
| | Albs^{a} | albusnodin | Streptomyces albus | Unknown |
| | Atx | astexin 1-3 | Asticcacaulis excentricus | Unknown |
| | Cln | caulonodin I-VII | Caulobacter sp. K31 | Unknown |
| | Cseg | caulosegnins I-III | Caulobacter segnis | Unknown |
| | Pade | Paeninodin | Paenibacillus dendritiformis C454 | Unknown |
| | Thco | unnamed | Thermobacillus composti KWC4 | Unknown |
| | Papo | unnamed | Paenibacillus polymyxa CR1 | Unknown |
| | Stsp | unnamed | Streptomyces sp. Amel2xC10 | Unknown |
| Glycocin | Lcn | listeriocytocin | Listeria monocytogenes SLCC2540 | Unknown |
| | Pal | pallidocin | Aeribacillus pallidus 8 | Antibiotic |
| Microcin C | Bam | unnamed | Bacillus amyloliquefaciens DSM7 | Antibiotic |
| ComX | Com | ComX | Bacillus subtilus | quorum sensing |
| Pantocin | Paa | pantocin | Pantoea agglomerans | Antibiotic |
| Sulfa-tyrotide | Rax | RaxX | Xanthomonas oryzae | Plant signaling |
| Splice-otide | Plp | unnamed | Pleurocapsa sp. PCC7319 | Unknown |
| | Pcp | unnamed | Pleurocapsa sp. PCC7327 | Unknown |
| Lanthi-peptide | Crn | carnolysin A1′ | Carnobacterium maltaromaticum C2 | Antibiotic |
| | | carnolysin A2′ | | |
| | Sgb | unnamed | S. globisporus subsp. globisporus | Unknown |
| | | | NRRL B2293 | |
| | Bsj | bicereucins | Bacillus cereus SJ1 | Antibiotic |
| | Ltn | lacticin S | Lactococcus lactis | Antibiotic |
| | | lacticin 3147 | | |
| | Proc | prochlorosins | Prochlorococcus MIT9313 | Unknown |
| | Mcb | microcin B17 | Escherichia coli | Antibiotic |
| | Mib | micro-bisporicin | Microbispora corallina | Antibiotic |
| | Cin | cinnamycin | Streptomyces cinnamoneus | Antibiotic |
| | | | cinnamoneus DSM 40005 | |
| | Hal | haloduracin A1 | Bacillus halodurans C-125 | Antibiotic |
| | | haloduracin A2 | | |
| | Epi | epidermin | Staphylococcus epidermidis | Antibiotic |
| Micro-viridin | AMdn | unnamed | Anabaena sp. PCC7120 | Unknown |
| | Psn | plesiocin | Plesiocystis pacifica | protease inhibitor |
| | Mdn | microviridin L | Microcystis aeruginosa NIES843 | protease inhibitor |
| | Tgn | unnamed | Bacillus thuringiensis serovar | Unknown |
| | | | huazhongensis BGSC 4BD | |
| Cyano-bactin | Tru | trunkamide | Prochloron spp. | Unknown |
| | | patellins | | |
| | Lyn | unnamed | Prochloron spp. | Unknown |
| | Kgp | kawaguchi-peptin | Microcystis aeruginosa NIES-88 | Unknown |
| Thio-peptide | Pbt | GE2270 | Planobispora rosea | Antibiotic |
| Sacti-peptide | Alb/Sbo | subtilosin A | Bacillus subtilis subsp. spizizenii | Antibiotic |
| | Pap | freyrasin | Paenibacillus polymyxa ATCC 842 | Antibiotic |

TABLE 14
Enzyme-mediated modifications

| Peptide Type | Enzyme Type | Mass Shift^{a} | Enzyme Name |
|---|---|---|---|
| Lassopeptide | Amino- | −Leader (leader | LasBCD, CapBC, AlbsBC, |
| | peptidase + cyclase | cleavage) −18 Da | AtxBC, Cln1BC, Cln2BC, |
| | | (cyclization) | Cln3BC, CsegBC |
| | Acetyl-transferase | +42 Da (acetylation) | AlbsT |
| | Kinase | +80 Da (phosphorylation) | PadeK, ThcoK, PapoK |
| | O-methyl-transferase | +14 Da (methylation) | LasF, StspM |
| Glycocin | Glycosyl-transferase | +162.14 Da (glycosylation) | LcnG, PalS |
| Microcin | cytidylyl-transferase | +305.18 Da (cytidylation) | BamB |
| ComX | Prenyl transferase | +204.4 Da (prenylation) | ComQ |
| Pantocin | Claisen | −80 Da (Claisen condensation and | PaaA |
| | | decarboxylation) | |
| Sulfatyrotide | Sulfo-transferase | +80 Da (sulfation) | RaxST |
| Spliceotide | rSAM tyrosinase | −135 Da (tyramine excision) | PlpXY, PcpXY |
| Lanthipeptide | LanM: Dehydratase + | −18 Da (dehydration) | CmM, SgbL, BsjM, LtnM1, |
| | thioether cyclase | | LtnM2, ProcM, HalM1, HalM2 |
| | TOMM | −18 Da (dehydration) | McbCD |
| | halogenase | +34.5 Da (chlorination) | MibHS |
| | P450 | +16 Da (hydroxylation) | MibO, CinX |
| | De-carboxylase | −44 Da (decarboxylation) | MibD, EpiD |
| Microviridin | Lactone cyclase | −18 Da (dehydration) | AMdnC, PsnB, MdnC, TgnB |
| Cyanobactin | TOMM | −18 Da (dehydration) | TruD, LynD |
| | Prenyl transferase | +136.2 Da (prenylation) | KgpF |
| Thiopeptide | P450 | +16 Da (hydroxylation) | PbtO |
| | N-methyl-transferase | +14 Da (methylation) | PbtM1 |
| Sactipeptide | rSAM cyclase | −2 Da (dehydrogenation) | AlbA |
| SCIFF/ | rSAM cyclase | −2 Da (dehydrogenation) | PapB |
| Ranthipeptide | | | |

^{a}Mass shift listed is for a single modification. Enzymes can multiply-modify their peptide substrate, resulting in a total mass shift that is multiplied by the integer number of modifications performed.

[0689] The cultures were grown following the high-throughput protocol in 96-well plates. Both TB and LB media have been used previously to functionally express certain RiPPs in E. coli. The choice of media can impact the function of an enzyme; for example, radical S-adenosyl-L-methionine (rSAM) enzymes are more active in TB than LB, the latter requiring a reduction in shake speed and/or increased iron-sulfur cluster biosynthesis [22, 60, 61]. For applications requiring the high-throughput mining or the artificial combination of RiPP enzymes (retrosynthesis), it is desirable to have a single set of culture conditions. To this end, the ability for the enzymes to modify their precursor peptides was evaluated following the same culture conditions either in LB or TB (Table 15 and FIG. 43). All of the enzymes and precursor peptides were expressed in 1 mL of media in deep-well plates with shaking. Induction by 1 mM IPTG and 200 μM cumate was performed for 20 hours at 30° C., after which the modified peptide was purified and desalted. In all cases, the modification could be observed by LC-MS without cleaving RST_{N}. In total, 24/47 (51%) of the enzymes tested were found to be active against at least one peptide in one of the medias tested. The % modified values shown in Table 14 were calculated from the extracted compound chromatograms (ECCs) based on the expected charge state m/z's for unmodified, partially modified (if relevant) and modified peptide molar masses. More enzymes (24) had activity in TB than LB (20) and, on average, the % modified was higher. As expected, rSAM enzymes (AlbA, PapB, PlpXY) were found to be more active in TB and several only had activity in this media. Similarly, RaxST is a sulfur-requiring enzyme that was found to be more active in TB.

[0690] The 25 modified peptides shown in Table 14 showed the exact mass change that was expected to result from the modification shown. However, some modifications could occur at different positions than the wild-type modification, leading to a different peptide with the same mass. In instances in which multiple modification products are possible, the addition of an RST could change where the modification occurs. To test for this outcome, several modifications were selected from different classes for evaluation by LC-MS/MS. The following were selected for structural annotation: PsnA2 macrolactonization by PsnB, and PapA sactionine macrocyclization by PapB. The precursor peptides were modified to contain a TEV cleavage site between the leader and core peptides. The modifying enzymes and precursor peptides were expressed following the high-throughput protocol, the RST and leader peptide removed using TEV protease, and the modified core analyzed with LC-MS/MS. Fragmentation of PsnA2 was observed between the core repeats, with each core repeat fragment mass corresponding to two lactone macrocyclizations per repeat, in agreement with previously published results[19]. Within each core repeat, MS/MS was not able to validate the cyclization topology within each core, which was previously determined by analyzing partially hydrolyzed modified peptide. Without using high collision energies, fragmentation products of PapA were only observed outside of predicted C-D ring structures, in agreement with published MS/MS spectra[61].

[0691] Of the enzymes tested, 23 of the 47 did not correctly modify a peptide when co-expressed in E. coli. Patterns based on the phylogeny from which the pathway was sourced were sought, noting that the sources spanned cyanobacteria, actinobacteria, proteobacteria, and firmicutes (FIG. 58). Each of these phyla provided functional examples. The least successful phylum, Actinobacteria, yielded 2/7 functional pathways, but this was not too different from the 5/9 success rate of Proteobacteria, of which E. coli is a member. Therefore, it was determined that there is no relationship between similarity to E. coli and the likelihood of success. Enzymes categorized according to most modification chemical transformation types had at least one enzyme that was functional (FIG. 59), but both prenyl transferases (ComQ and KgpF) and all three P450 oxidases (MibO, CinX, and PbtO) were not functional. For other non-functional chemical transformation types, only one example was tested (acetyl-transferase: AlbsT, halogenase: MibHS, and N-methyl transferase: PbtM1).

### DISCUSSION

[0692] While the number of characterized RiPP enzymes is growing rapidly in the literature, the conditions under which each enzyme is characterized vary across studies. This poses a challenge for high-throughput screening efforts if the conditions have to be re-optimized for each pathway. This Example presents a side-by-side survey of recombinant RiPP enzymes in E. coli, using the same growth and induction methods. Further, this Example provides protocols for every step to be performed in 96-well plate format under conditions that are consistent with high-throughput screening platforms [2, 70-72]. The RSTs address the problem of precursor peptide stability, for which degradation and solubility are the dominant causes of unobservable product. Their use increases the probability that a pathway will be successfully expressed in a new host; in other words, they increase the “hit rate” of screening efforts. The RSTs do not interfere with the action of modifying enzymes, facilitate high-throughput purification and do not need to be removed prior to LC-MS analysis of modifications. Software was developed to rapidly analyze LC-MS data. Collectively, this presents a suite of tools that enable the high-throughput screening of RiPP pathways mined from sequence databases [13, 73, 74]. In this manuscript, the action of only a single enzyme at a time was investigated. To mine complete RiPP-encoding gene clusters, additional enzyme genes can either be assembled as operons or placed under the control of different inducible promoters (e.g., E. coli Marionette as described in the preceding Examples).

[0693] The fraction of enzymes found to be functional in E. coli under common conditions was surprisingly high, especially considering the diversity in the source genera and chemistries. The success rate was much higher than the successful transfer of other natural products genes, such as non-ribosomal peptide synthases, which also produce peptidic products. These results imply that RiPP enzymes can be combined from different sources to create synthetic pathways from which all the enzymes can be functionally expressed. Indeed, several examples have been published demonstrating the artificial combination of RiPP enzymes from different source species and pathways to make products not observed in nature [30, 75, 76]. Knowing that roughly half of RiPP enzymes are functionally compatible with E. coli dramatically expands the potential peptide chemical space that can be explored through the artificial mixing-and-matching of these enzymes. Fully enabling this requires a better understanding of the rules for designing precursor peptides that can be acted on by multiple modifying enzymes, such as the rules provided herein and in the preceding Examples. Collectively, these tools for the mining and de novo design of RiPPs enable the exploration of the vast universe of modified peptides for novel antibiotics, intercellular communication channels, and signaling molecules that influence animal and plant physiology.

### Materials and Methods

[0694] Strains, plasmids, media, and chemicals. E. coli NEB 10-beta (C3019I, New England BioLabs, Ipswich, Mass., USA) was used for all routine cloning. E. coli BL21 (C2530H, New England BioLabs, Ipswich, Mass., USA) was used to characterize RSTs and linker variants in low-throughput (flask) cultures. E. coli NEB Express (C2523I, New England BioLabs, Ipswich, Mass., USA) was used to express all other experiments. All plasmids containing RST-fused purcursor peptide genes use a pSC101 origin variant (var 2) with ampicillin resistance[77]. All plasmids carrying modifying enzyme genes contain p15A origins of replication and kanamycin resistance. LB-Miller media (B244620, BD, Franklin Lakes, N.J., USA) or TB media (T0311, Teknova, Hollister, Calif., USA) supplemented with 0.4% glycerol (BDH1172-4LP, VWR, OH, USA) were used for peptide expression and modification. 2xYT liquid media (B244020, BD, Franklin Lakes, N.J., USA) and 2xYT+2% agar (B214010, BD, Franklin Lakes, N.J., USA) plates were used for routine cloning and strain maintenance. SOB liquid media (S0210, Teknova, Hollister, Calif., USA) was used for making competent cells. SOC liquid media (B9020S, New England BioLabs, Iwsich, Mass., USA) was used for outgrowth. Cells were induced with the following chemicals: cumate (cuminic acid) ≥98% purity from Millipore Sigma (268402, Millipore Sigma, Saint Louis, Mo., USA) added as 1000× stock (200 mM) in EtOH or DMSO; isopropyl β-D-1-thiogalactopyranoside (IPTG) ≥99% purity (I2481C, Gold Biotechnology, Saint Louis, Mo., USA) added as 1000× stock (1 M) in water or DMSO; 3OC6-AHL from Millipore Sigma (K3007, Millipore Sigma, Saint Louis, Mo., USA) added as a 1000× stock (10 mM) in DMF. Cells were selected with the following antibiotics: 50 μg/ml kanamycin (K-120-10, Gold Biotechnology, Saint Louis, Mo., USA); 100 μg/ml carbenicillin (C-103-5, Gold Biotechnology, Saint Louis, Mo., USA); 30 μg/ml chloramphenicol. Liquid chromatography was performed with Optima Acetonitrile (A996-4, Thermo Fisher Scientific, MA, USA) and water (Milli-Q Advantage A10, Millipore Sigma, Saint Louis, Mo., USA) supplemented with LC-MS Grade Formic Acid (85178, Thermo Fisher Scientific). DNA oligos and gblocks were ordered from Integrated DNA Technologies (San Francisco, Calif., USA).

[0695] Gene design. A list of plasmids and corresponding plasmid maps are provided in Table 16. Amino acid sequences of all modifying enzymes and peptides are provided in Table 17. Sequences of genetic parts and full plasmids are provided in Table 18 and Table 19.

TABLE 16
Plasmids used in this Example

| Name | Origin | Marker | Backbone | Gene | Description |
|---|---|---|---|---|---|
| pEG1128 | p15A | Kan | bEG_S7 | truD | pLux modifying enzyme expression plasmid |
| pEG2192 | pSC101 var2 | Amp | bEG_S5 | papoA | RST_{N} peptide expression plasmid |
| pEG2194 | pSC101 var2 | Amp | bEG_S5 | bamA | RST_{N} peptide expression plasmid |
| pEG2195 | pSC101 var2 | Amp | bEG_S5 | epiA | RST_{N} peptide expression plasmid |
| pEG2199 | pSC101 var2 | Amp | bEG_S5 | halA1 | RST_{N} peptide expression plasmid |
| pEG2200 | pSC101 var2 | Amp | bEG_S5 | halA2 | RST_{N} peptide expression plasmid |
| pEG2312 | pSC101 var2 | Amp | bEG_S5 | papA_tev | RST_{N} peptide expression plasmid |
| pEG2575 | pSC101 var2 | Amp | bEG_S5 | psnA2_tev | RST_{N} peptide expression plasmid |
| pEG3017 | pSC101 var2 | Cm | bEG_S1 | truE* | MBP-tag peptide expression plasmid |
| pEG3045 | pSC101 var2 | Amp | bEG_S2 | mdnA | HIS-tag peptide expression plasmid |
| pEG3046 | pSC101 var2 | Amp | bEG_S2 | bmbC | HIS-tag peptide expression plasmid |
| pEG3047 | pSC101 var2 | Amp | bEG_S2 | strA | HIS-tag peptide expression plasmid |
| pEG3048 | pSC101 var2 | Amp | bEG_S2 | pqqA | HIS-tag peptide expression plasmid |
| pEG3049 | pSC101 var2 | Amp | bEG_S2 | sboA | HIS-tag peptide expression plasmid |
| pEG3051 | pSC101 var2 | Amp | bEG_S2 | tfxA | HIS-tag peptide expression plasmid |
| pEG3052 | pSC101 var2 | Amp | bEG_S2 | procA1.7 | HIS-tag peptide expression plasmid |
| pEG3053 | pSC101 var2 | Amp | bEG_S2 | tbtA | HIS-tag peptide expression plasmid |
| pEG3055 | pSC101 var2 | Amp | bEG_S2 | pgm2 | HIS-tag peptide expression plasmid |
| pEG3057 | pSC101 var2 | Amp | bEG_S3 | truE* | RST_{N}* peptide expression plasmid |
| pEG3058 | pSC101 var2 | Amp | bEG_S2 | mdnA | RST_{N}* peptide expression plasmid |
| pEG3059 | pSC101 var2 | Amp | bEG_S2 | sboA | RST_{N}* peptide expression plasmid |
| pEG3060 | pSC101 var2 | Amp | bEG_S2 | pqqA | RST_{N}* peptide expression plasmid |
| pEG3061 | pSC101 var2 | Amp | bEG_S2 | strA | RST_{N}* peptide expression plasmid |
| pEG3062 | pSC101 var2 | Amp | bEG_S2 | bmbC | RST_{N}* peptide expression plasmid |
| pEG3063 | pSC101 var2 | Amp | bEG_S2 | tfxA | RST_{N}* peptide expression plasmid |
| pEG3064 | pSC101 var2 | Amp | bEG_S2 | procA1.7 | RST_{N}* peptide expression plasmid |
| pEG3065 | pSC101 var2 | Amp | bEG_S2 | tbtA | RST_{N}* peptide expression plasmid |
| pEG3067 | pSC101 var2 | Amp | bEG_S2 | pgm2 | RST_{N}* peptide expression plasmid |
| pEG3121 | pSC101 var2 | Amp | bEG_S4 | mdnA* | RST_{N} peptide expression plasmid |
| pEG3128 | pSC101 var2 | Amp | bEG_S4 | procA* | RST_{N} peptide expression plasmid |
| pEG3132 | pSC101 var2 | Amp | bEG_S4 | paaP | RST_{N} peptide expression plasmid |
| pEG3157 | pSC101 var2 | Amp | bEG_S5 | mibA | RST_{N} peptide expression plasmid |
| pEG3161 | pSC101 var2 | Amp | bEG_S5 | plpA1 | RST_{N} peptide expression plasmid |
| pEG3162 | pSC101 var2 | Amp | bEG_S5 | plpA2 | RST_{N} peptide expression plasmid |
| pEG3165 | pSC101 var2 | Amp | bEG_S5 | pbtA | RST_{N} peptide expression plasmid |
| pEG3172 | pSC101 var2 | Amp | bEG_S5 | ltnA1 | RST_{N} peptide expression plasmid |
| pEG3173 | pSC101 var2 | Amp | bEG_S5 | ltnA2 | RST_{N} peptide expression plasmid |
| pEG3174 | pSC101 var2 | Amp | bEG_S5 | crnA1 | RST_{N} peptide expression plasmid |
| pEG3175 | pSC101 var2 | Amp | bEG_S5 | crnA2 | RST_{N} peptide expression plasmid |
| pEG3176 | pSC101 var2 | Amp | bEG_S5 | bsjA2 | RST_{N} peptide expression plasmid |
| pEG3177 | pSC101 var2 | Amp | bEG_S5 | bsjA3 | RST_{N} peptide expression plasmid |
| pEG3178 | pSC101 var2 | Amp | bEG_S5 | cinA | RST_{N} peptide expression plasmid |
| pEG3180 | pSC101 var2 | Amp | bEG_S5 | lasA | RST_{N} peptide expression plasmid |
| pEG3181 | pSC101 var2 | Amp | bEG_S5 | albsA | RST_{N} peptide expression plasmid |
| pEG3182 | pSC101 var2 | Amp | bEG_S5 | mcbA | RST_{N} peptide expression plasmid |
| pEG3194 | pSC101 var2 | Amp | bEG_S5 | psnA2 | RST_{N} peptide expression plasmid |
| pEG3197 | pSC101 var2 | Amp | bEG_S5 | aMdnA | RST_{N} peptide expression plasmid |
| pEG3212 | pSC101 var2 | Amp | bEG_S6 | capA | RST_{C} peptide expression plasmid |
| pEG3213 | pSC101 var2 | Amp | bEG_S6 | lasA | RST_{C} peptide expression plasmid |
| pEG3214 | pSC101 var2 | Amp | bEG_S6 | albsA | RST_{C} peptide expression plasmid |
| pEG3215 | pSC101 var2 | Amp | bEG_S6 | atxA1 | RST_{C} peptide expression plasmid |
| pEG3248 | pSC101 var2 | Amp | bEG_S4 | sboA | RST_{N} peptide expression plasmid |
| pEG3283 | pSC101 var2 | Amp | bEG_S5 | papA | RST_{N} peptide expression plasmid |
| pEG3286 | pSC101 var2 | Amp | bEG_S5 | pcpA | RST_{N} peptide expression plasmid |
| pEG3553 | pSC101 var2 | Amp | bEG_S6 | cln1A1 | RST_{C} peptide expression plasmid |
| pEG3554 | pSC101 var2 | Amp | bEG_S6 | cln1A2 | RST_{C} peptide expression plasmid |
| pEG3555 | pSC101 var2 | Amp | bEG_S6 | cln2A1 | RST_{C} peptide expression plasmid |
| pEG3556 | pSC101 var2 | Amp | bEG_S6 | cln2A2 | RST_{C} peptide expression plasmid |
| pEG3557 | pSC101 var2 | Amp | bEG_S6 | cln3A1 | RST_{C} peptide expression plasmid |
| pEG3558 | pSC101 var2 | Amp | bEG_S6 | cln3A2 | RST_{C} peptide expression plasmid |
| pEG3559 | pSC101 var2 | Amp | bEG_S6 | cln3A3 | RST_{C} peptide expression plasmid |
| pEG3560 | pSC101 var2 | Amp | bEG_S6 | csegA1 | RST_{C} peptide expression plasmid |
| pEG3561 | pSC101 var2 | Amp | bEG_S6 | csegA2 | RST_{C} peptide expression plasmid |
| pEG3562 | pSC101 var2 | Amp | bEG_S6 | csegA3 | RST_{C} peptide expression plasmid |
| pEG3563 | pSC101 var2 | Amp | bEG_S5 | padeA | RST_{N} peptide expression plasmid |
| pEG3564 | pSC101 var2 | Amp | bEG_S5 | thcoA | RST_{N} peptide expression plasmid |
| pEG3565 | pSC101 var2 | Amp | bEG_S5 | stspA | RST_{N} peptide expression plasmid |
| pEG3567 | pSC101 var2 | Amp | bEG_S5 | lcnA | RST_{N} peptide expression plasmid |
| pEG3568 | pSC101 var2 | Amp | bEG_S5 | pal A | RST_{N} peptide expression plasmid |
| pEG3570 | pSC101 var2 | Amp | bEG_S5 | raxX | RST_{N} peptide expression plasmid |
| pEG3571 | pSC101 var2 | Amp | bEG_S5 | comX | RST_{N} peptide expression plasmid |
| pEG3572 | pSC101 var2 | Amp | bEG_S5 | kgpE | RST_{N} peptide expression plasmid |
| pEG3574 | pSC101 var2 | Amp | bEG_S5 | tgnA* | RST_{N} peptide expression plasmid |
| pEG3871 | pSC101 var2 | Amp | bEG_S5 | sgbA | RST_{N} peptide expression plasmid |
| pEG3905 | pSC101 var2 | Amp | bEG_S5 | truE | RST_{N} peptide expression plasmid |
| pEG7034 | p15A | Kan | bEG_S9 | truD | pCym modifying enzyme expression plasmid |
| pEG7035 | p15A | Kan | bEG_S9 | alba | pCym modifying enzyme expression plasmid |
| pEG7037 | p15A | Kan | bEG_S9 | mdnC | pCym modifying enzyme expression plasmid |
| pEG7043 | p15A | Kan | bEG_S9 | procM | pCym modifying enzyme expression plasmid |
| pEG7047 | p15A | Kan | bEG_S9 | mibHS | pCym modifying enzyme expression plasmid |
| pEG7048 | p15A | Kan | bEG_S9 | mibD | pCym modifying enzyme expression plasmid |
| pEG7056 | p15A | Kan | bEG_S9 | plpXY | pCym modifying enzyme expression plasmid |
| pEG7058 | p15A | Kan | bEG_S9 | pbtO | pCym modifying enzyme expression plasmid |
| pEG7059 | p15A | Kan | bEG_S9 | pbtM1 | pCym modifying enzyme expression plasmid |
| pEG7060 | p15A | Kan | bEG_S9 | paaA | pCym modifying enzyme expression plasmid |
| pEG7066 | p15A | Kan | bEG_S9 | cinX | pCym modifying enzyme expression plasmid |
| pEG7067 | p15A | Kan | bEG_S9 | capBC | pCym modifying enzyme expression plasmid |
| pEG7068 | p15A | Kan | bEG_S9 | lasBCD | pCym modifying enzyme expression plasmid |
| pEG7069 | p15A | Kan | bEG_S9 | lasF | pCym modifying enzyme expression plasmid |
| pEG7070 | p15A | Kan | bEG_S9 | albsBC | pCym modifying enzyme expression plasmid |
| pEG7071 | p15A | Kan | bEG_S9 | albsT | pCym modifying enzyme expression plasmid |
| pEG7073 | p15A | Kan | bEG_S9 | mcbCD | pCym modifying enzyme expression plasmid |
| pEG7074 | p15A | Kan | bEG_S9 | mibO | pCym modifying enzyme expression plasmid |
| pEG7076 | p15A | Kan | bEG_S9 | ltnM1 | pCym modifying enzyme expression plasmid |
| pEG7077 | p15A | Kan | bEG_S9 | ltnM2 | pCym modifying enzyme expression plasmid |
| pEG7078 | p15A | Kan | bEG_S9 | crnM | pCym modifying enzyme expression plasmid |
| pEG7079 | p15A | Kan | bEG_S9 | bsjM | pCym modifying enzyme expression plasmid |
| pEG7127 | p15A | Kan | bEG_S9 | psnB | pCym modifying enzyme expression plasmid |
| pEG7130 | p15A | Kan | bEG_S9 | amdnC | pCym modifying enzyme expression plasmid |
| pEG7132 | p15A | Kan | bEG_S9 | atxBC | pCym modifying enzyme expression plasmid |
| pEG7133 | p15A | Kan | bEG_S9 | cln1BC | pCym modifying enzyme expression plasmid |
| pEG7134 | p15A | Kan | bEG_S9 | cln2BC | pCym modifying enzyme expression plasmid |
| pEG7135 | p15A | Kan | bEG_S9 | cln3BC | pCym modifying enzyme expression plasmid |
| pEG7136 | p15A | Kan | bEG_S9 | csegBC | pCym modifying enzyme expression plasmid |
| pEG7137 | p15A | Kan | bEG_S9 | padeK | pCym modifying enzyme expression plasmid |
| pEG7138 | p15A | Kan | bEG_S9 | thcoK | pCym modifying enzyme expression plasmid |
| pEG7139 | p15A | Kan | bEG_S9 | stspM | pCym modifying enzyme expression plasmid |
| pEG7141 | p15A | Kan | bEG_S9 | lcnG | pCym modifying enzyme expression plasmid |
| pEG7142 | p15A | Kan | bEG_S9 | palS | pCym modifying enzyme expression plasmid |
| pEG7143 | p15A | Kan | bEG_S9 | sgbL | pCym modifying enzyme expression plasmid |
| pEG7144 | p15A | Kan | bEG_S9 | raxST | pCym modifying enzyme expression plasmid |
| pEG7145 | p15A | Kan | bEG_S9 | comQ | pCym modifying enzyme expression plasmid |
| pEG7146 | p15A | Kan | bEG_S9 | kgpF | pCym modifying enzyme expression plasmid |
| pEG7147 | p15A | Kan | bEG_S9 | tgnB | pCym modifying enzyme expression plasmid |
| pEG7149 | p15A | Kan | bEG_S9 | papB | pCym modifying enzyme expression plasmid |
| pEG7152 | p15A | Kan | bEG_S9 | pcpXY | pCym modifying enzyme expression plasmid |
| pEG7160 | p15A | Kan | bEG_S9 | lynD | pCym modifying enzyme expression plasmid |
| pEG7166 | p15A | Kan | bEG_S9 | papoK | pCym modifying enzyme expression plasmid |
| pEG7169 | p15A | Kan | bEG_S9 | epiD | pCym modifying enzyme expression plasmid |
| pEG7171 | p15A | Kan | bEG_S9 | bamB | pCym modifying enzyme expression plasmid |
| pEG7172 | p15A | Kan | bEG_S8 | halM1 | pCym modifying enzyme expression plasmid |
| pEG7173 | p15A | Kan | bEG_S8 | halM2 | pCym modifying enzyme expression plasmid |

[0696] Peptide expression/modification from flasks and purification. Plasmids were transformed into E. coli BL21, struck out on 2xYT agar with carbenicillin (or chloramphenicol for pEG3017) and kanamycin (if co-transforming modifying enzyme) and incubated (30° C., overnight). Individual colonies were used to inoculate 3 mL of LB media in a culture tube (352059, Corning, N.Y., USA) and incubated overnight (30° C., 250 r.p.m.) in an Innova44 (Eppendorf, N.Y., USA). Aliquots (500 l) were taken from the overnight cultures and subcultured into 50 mL of LB media in a 250 mL Erlenmeyer flask. After 3 hours incubation (Innova44, 30° C., 250 r.p.m.), IPTG and 3OC6-AHL (if inducing modifying enzyme) was added to final concentrations of 1 mM and 10 μM and cultures were incubated for 20 hours (Innova44, 18° C., 250 r.p.m.) (note: IPTG was not added for pEG3017, where the MBP-tagged peptide is constitutively expressed). The 50 mL cultures were transferred to a falcon tube (352070, Corning, N.Y., USA), centrifuged (4,500 g, 4° C., 20 min) in a Sorvall Legend XFR Centrifuge (Thermo Fisher Scientific, MA, USA), pellets were resuspended in 600 μl lysis buffer (5 M guanidinium hydrochloride, 300 mM NaCl, 50 mM sodium phosphate, pH 7.5), and freeze-thawed twice (frozen in −80° C. freezer; thawed in innova44 incubator at 30° C., 250 r.p.m). Cell lysates were centrifuged (Eppendorf 5424, 21,130 g, room temperature, 15 min) in an Eppendorf 5424 Centrifuge (Eppendorf, N.Y., USA) and the peptides affinity purified using His SpinTrap TALON columns (29-0005-93, GE Life Sciences (now Cytiva), Marlborough, Mass., USA), following manufacturer instructions, using 600 μL lysis buffer twice for column equilibration, loading 600 □L clarified lysate, two washes with 600 μL wash buffer (300 mM NaCl, 50 mM sodium phosphate, 5 mM imidazole, pH 7.5), and 200 μL elution buffer (300 mM NaCl, 50 mM sodium phosphate, 200 mM imidazole, pH 7.5) for elution. Purifications used an Eppendorf 5424 centrifuge.

[0697] Calculation of peptide molar masses. For large peptides/proteins, mass was calculated as described for ESIprot79: five consecutively charged m/z's (m1, m2, m3, m4, m5) were taken from the spectra and used to calculate the charge states (z1, z2, z3, z4, z5) for each of the peaks. For peaks m1 and m2, which have charge states, z1 and z2, where z2=z1−1 (peak 1 has one proton more than peak 2): z1=(m2−1)/(m2−m1). Charges z1, z2, z3, and z4 were calculated using each of the four pairs of consecutively charged masses (m1 and m2, m2 and m3, m3 and m4, m4 and m5), subtracted by the number of protons the peak has compared to m5, and averaged together and rounded to the nearest integer to calculate the lowest charge (z5). Charges z1-4 are recalculated based on charge z5 (z1=z5+4, z2=z5+3, etc.), uncharged masses are calculated from each of the five m/z's: uncharged mass=zx(observed m/z)−zx.

[0698] Peptide expression in 96-well plates. Plasmids were transformed into E. coli NEB Express using 15 μL of competent cells and 1 μL of each plasmid being transformed in a 96-well PCR plate (1402-9596, USA Scientific, FL, USA or 951020401, Eppendorf, N.Y., USA). Transformations were incubated on ice (20-30 min), heat shocked (40° C., 30 sec), and incubated on ice again (5 min). Cells were then transferred to a deep well 96-well plate (1896-2000, USA Scientific, FL, USA) with 100 μL of SOC media. After outgrowth (Multitron Pro, 1 hr, 37° C.) in an Infors HT Multitron Pro (Infors USA, MD, USA), 400 μL LB media was added with appropriate antibiotics (100 μg/ml carbenicillin and 50 μg/ml kanamycin) and incubated (Multitron Pro, 30° C., 900 r.p.m.) until all wells reached stationary phase (cultures were visibly saturated, 12-30 hours). Overnight cultures were diluted 1:100 into 1 mL LB or TB media (with same antibiotics as previous culture) in deep well plates. After a 3 hour incubation (Multitron Pro, 30° C., 900 r.p.m.), appropriate inducer was added (1 mM IPTG or 200 μM cumate) and cultures were incubated for 20 hours (Multitron Pro, 30° C., 900 r.p.m.). The 96-well plates were centrifuged (Legend XFR, 4,500 g, 4° C., 20 min) and media discarded. Pellets were either purified immediately or frozen at −20 C until purification.

[0699] Haloduracin production and purification. Haloduracin was produced following the 96-well expression protocol described above, with each sample being produced in two wells of 1 mL TB media to double the amount of product produced. Culture pellets were resuspended in 800 L lysis buffer, freeze-thawed (frozen at −80° C.; thawed in Multitron Pro at 37° C., 900 r.p.m), and centrifuged (Legend XFR, 4,500 g, 4° C., 30 min). Peptides were affinity purified using HIS MultiTrap TALON plates, using 500 μL water and two 500 μL lysis buffer washes for column equilibration (Legend XFR, 500 g, 4° C., 2 min), loading 600 μL of both matching sample's clarified lysates iteratively (load one, then centrifuge, then load the second, then centrifuge) (Legend XFR, 100 g, 4° C., 5 min), washing twice with 500 μL wash buffer, and eluting three times with 200 μL elution buffer to maximize titer. Purification was followed by solid-phase extraction (SPE) using Strata-XL microtiter plates (8E-S043-TGB, Phenomenex, CA, USA). Plates were conditioned with 1 mL methanol wash followed by 1 mL water wash. All 600 μL of TALON eluent was loaded, washed twice with 1 mL water, and then eluted twice with 500 μl 1:1 acetonitrile:water (supplemented with 0.1% formic acid). Plates with eluent were dried down at room temperature in a Savant Speedvac SPD2010 (Thermo Fisher Scientific, MA, USA), samples resuspended in 40 μL TE buffer (10 mM tris, 1 mM EDTA) with 20 μL 2 mg/mL TEV protease, and then incubated (stationary, 30° C., 8 hr). Cut fractions were desalted using a Strata-X SPE plate (8E-S100-TGB, Phenomenex, CA, USA) with same condition/wash/elution/drying steps as above. Dried down samples were resuspended in 50 μL 1:1 methanol:water.

[0700] Proteolytic cleavage and removal of SUMO. For purification of haloduracin for antimicrobial assays, TEV protease was purified as described previously 78 [Addgene #8827, concentrated to 2 mg/mL in TEV buffer (25 mM Tris-HCl, pH 8.0, 50 mM NaCl, 1 mM TCEP, 50% glycerol)]. For MS/MS analysis, TEV protease was prepared as a 50 mg/mL solution of 10% (w/w) TEV lyophilizate (Gene and Cell Technologies, CA, USA) in TEV Buffer.

### REFERENCES FROM EXAMPLE 8

[0701] 1. Zhang, M. M.; et al., Expert Opinion on Drug Discovery 2017, 12 (5), 475-487.
[0702] 2. Smanski, M. J.; et al., Nature Reviews Microbiology 2016, 14 (3), 135-149.
[0703] 3. Medema, M. H.; Fischbach, M. A., Nature Chemical Biology 2015, 11 (9), 639-648.
[0704] 4. Bayer, T. S.; et al., Journal of the American Chemical Society 2009, 131 (18), 6508-6515.
[0705] 5. Freeman, M. F.; et al., Science 2012, 338 (6105), 387-390.
[0706] 6. Guo, C.-J.; et al., Cell 2017, 168 (3), 517-526.e18.
[0707] 7. Arnison, P. G.; et al., Nat. Prod. Rep. 2013, 30 (1), 108-160.
[0708] 8. Lin, P. F.; et al., Antimicrobial Agents and Chemotherapy 1996, 40 (1), 133-138.
[0709] 9. Jin, M.; et al., Angewandte Chemie International Edition 2003, 42 (25), 2898-2901.
[0710] 10. Potterat, O.; et al., Journal of Natural Products 2004, 67 (9), 1528-1531.
[0711] 11. Yano, K.; et al., The Journal of Antibiotics 1995, 48 (11), 1368-1370.
[0712] 12. Vogt, E.; Künzler, M., Applied Microbiology and Biotechnology 2019, 103 (14), 5567-5581.
[0713] 13. Skinnider, M. A.; et al., Proceedings of the National Academy of Sciences 2016, 113 (42), E6343-E6351.
[0714] 14. Montalbán-López, M.; et al., Natural Product Reports 2021.
[0715] 15. Li, Y., Protein Expression and Purification 2011, 80 (2), 260-267.
[0716] 16. Shi, Y.; et al., Journal of the American Chemical Society 2011, 133 (8), 2338-2341.
[0717] 17. Donia, M. S.; et al., Nature Chemical Biology 2008, 4 (6), 341-343.
[0718] 18. Zhang, Y., et al., Nature Communications 2018, 9 (1).
[0719] 19. Lee, H., et al., Biochemistry 2017, 56 (37), 4927-4930.
[0720] 20. Meulenberg, J., FEMS Microbiology Letters 1990, 71 (3), 337-343.
[0721] 21. Morinaka, B. I.; et al., Science 2018, 359 (6377), 779-782.
[0722] 22. Himes, P. M.; et al., ACS Chemical Biology 2016, 11 (6), 1737-1744.
[0723] 23. Zhang, Z.; et al., Journal of the American Chemical Society 2016, 138 (48), 15511-15514.
[0724] 24. Van Staden, A. D. P et al., ACS Synthetic Biology 2019, 8 (10), 2220-2227.
[0725] 25. Zhu, S.; et al., J Biol Chem 2016, 291 (26), 13662-78.
[0726] 26. Hegemann, J. D.; et al., Journal of the American Chemical Society 2013, 135 (1), 210-222.
[0727] 27. Ren, H.; et al., ACS Chemical Biology 2018, 13 (10), 2966-2972.
[0728] 28. Serebryakova, M.; et al., Journal of the American Chemical Society 2016, 138 (48), 15690-15698.
[0729] 29. Weiz, R., et al., Chemistry & Biology 2011, 18 (11), 1413-1421.
[0730] 30. Burkhart, B. J.; et al., ACS Central Science 2017, 3 (6), 629-638.
[0731] 31. Bhushan, A.; et al., Nature Chemistry 2019, 11 (10), 931-939.
[0732] 32. Young, S., et al., Chemistry & Biology 2012, 19 (12), 1600-1610.
[0733] 33. Knappe, T. A.; et al., Journal of the American Chemical Society 2008, 130 (34), 11446-11454.
[0734] 34. Mcclerren, A. L.; et al., Proceedings of the National Academy of Sciences 2006, 103 (46), 17243-17248.
[0735] 35. Hudson, G. A.; et al., Journal of the American Chemical Society 2015, 137 (51), 16012-16015.
[0736] 36. Reyna-Gonzilez, E.; et al., Angewandte Chemie International Edition 2016, 55 (32), 9398-9401.
[0737] 37. Vinogradov, A. A.; et al., Nature Communications 2020, 11 (1).
[0738] 38. Rosano, G. N. L.; et al., Frontiers in Microbiology 2014, 5.
[0739] 39. Panavas, T.; et al., Methods in Molecular Biology, Humana Press: 2009; pp 303-317.
[0740] 40. Gaglione, R.; et al., New Biotechnology 2019, 51, 39-48.
[0741] 41. Satakarni, M.; et al., Protein Expression and Purification 2011, 78 (2), 113-119.
[0742] 42. He, J.; et al., Molecules 2018, 23 (9), 2246.
[0743] 43. Ma, Q.; et al., The Journal of Microbiology 2012, 50 (2), 326-331.
[0744] 44. Nguyen, T. Q. N.; et al., Nature Chemistry 2020, 12 (11), 1042-1053.
[0745] 45. Meyer, A. J.; et al., Nature Chemical Biology 2019, 15 (2), 196-204.
[0746] 46. Rocco, C. J.; et al., Plasmid 2008, 59 (3), 231-237.
[0747] 47. Mrksich, M., ACS Nano 2008, 2 (1), 7-18.
[0748] 48. Huang, C.-F.; et al., ACS Combinatorial Science 2019, 21 (11), 760-769.
[0749] 49. Espah Borujeni, A.; et al., Nucleic Acids Research 2014, 42 (4), 2646-2659.
[0750] 50. Salis, H. M.; et al., Nature Biotechnology 2009, 27 (10), 946-950.
[0751] 51. Hou, Y.; et al., Organic Letters 2012, 14 (19), 5050-5053.
[0752] 52. Schramma, K. R.; et al., Nature Chemistry 2015, 7 (5), 431-437.
[0753] 53. Babasaki, K.; et al., The Journal of Biochemistry 1985, 98 (3), 585-603.
[0754] 54. Breil, B.; et al., Journal of bacteriology 1996, 178 (14), 4150-4156.
[0755] 55. Li, B.; et al., Proceedings of the National Academy of Sciences 2010, 107 (23), 10430-10435.
[0756] 56. Morris, R. P.; et al., Journal of the American Chemical Society 2009, 131 (16), 5946-5955.
[0757] 57. Noike, M.; et al., Nature Chemical Biology 2015, 11 (1), 71-76.
[0758] 58. Cooper, L. E.; et al., Chemistry & Biology 2008, 15 (10), 1035-1045.
[0759] 59. Zhang, Q.; et al., Proceedings of the National Academy of Sciences 2014, 111 (33), 12031-12036.
[0760] 60. Caruso, A.; et al., Journal of the American Chemical Society 2019, 141 (42), 16610-16614.
[0761] 61. Hudson, G. A.; et al., Journal of the American Chemical Society 2019.
[0762] 62. Shuguo, H.; et al., Applied Biochemistry and Biotechnology 2012, 166 (5), 1368-1379.
[0763] 63. Zimmermann, M.; et al., Chem. Sci. 2014, 5 (10), 4032-4043.
[0764] 64. Zhu, S.; et al., FEBS Letters 2016, 590 (19), 3323-3334.
[0765] 65. Gavrish, E.; et al., Chemistry & Biology 2014, 21 (4), 509-518.
[0766] 66. Ghodge, S. V.; et al., Journal of the American Chemical Society 2016, 138 (17), 5487-5490.
[0767] 67. Luu, D. D.; et al., Proceedings of the National Academy of Sciences 2019, 116 (17), 8525-8534.
[0768] 68. Kupke, T.; et al., Journal of Biological Chemistry 1995, 270 (19), 11282-11289.
[0769] 69. Sardar, D.; et al., ACS Synthetic Biology 2015, 4 (2), 167-176.
[0770] 70. Casini, A.; et al., Journal of the American Chemical Society 2018, 140 (12), 4302-4316.
[0771] 71. Hillson, N.; et al., Nature Communications 2019, 10 (1).
[0772] 72. Voigt, C. A., Nature Communications 2020, 11 (1).
[0773] 73. Kloosterman, A. M.; et al., mSystems 2020, 5 (5).
[0774] 74. Tietz, J. I.; et al., Nature Chemical Biology 2017, 13 (5), 470-478.
[0775] 75. Sardar, D.; et al., Chemistry & Biology 2015, 22 (7), 907-916.
[0776] 76. Van Heel, A. J.; et al., ACS Synthetic Biology 2013, 2 (7), 397-404.
[0777] 77. Segall-Shapiro, T. H.; et al., Nature Biotechnology 2018, 36 (4), 352-358.
[0778] 78. Tropea, J. E.; et al., Methods in Molecular Biology, Humana Press: 2009; pp 297-307.
[0779] 79. Winkler, R., Rapid Communications in Mass Spectrometry 2010, 24 (3), 285-294.
[0780] 80. Patiny, L.; et al., Journal of Chemical Information and Modeling 2013, 53 (5), 1223-1228.

### SEQUENCES USED IN THE EXAMPLES

TABLE 3
Non-limiting example of peptides (e.g., modified peptides)

| | Peptide | Leader | Core | | |
|---|---|---|---|---|---|
| Name | Sequence | sequence | sequence | Mod | Coding sequence (CDS) |
| gAMK- | MLKQINVIAGV | MLKQINVIAGV | ACTACEQCSK | L5 | ATGCTGAAACAGATCAAC |
| 174 | KEPIRAYACTA | KEPIRAY | CDTNEK | | GTTATTGCGGGTGTGAAA |
| | CEQCSKCDTNE | (SEQ ID NO: 46) | (SEQ ID NO: 6) | | GAGCCGATTCGCGCGTAC |
| | K | | | | GCCTGTACCGCATGTGAG |
| | (SEQ ID NO: 26) | | | | CAATGCAGTAAATGTGAC |
| | | | | | ACCAATGAGAAG |
| | | | | | (SEQ ID NO: 47) |
| gAMK- | MLKQINVIAGV | MLKQINVIAGV | ECPADETCMH | L5 | ATGCTGAAACAGATAAAC |
| 175 | KEPIRAYECPA | KEPIRAY | CESHEM | | GTCATTGCAGGCGTCAAG |
| | DETCMHCESH | (SEQ ID NO: 46) | (SEQ ID NO: 7) | | GAACCCATTCGCGCGTAT |
| | EM | | | | GAATGTCCGGCCGATGAA |
| | (SEQ ID NO: 27) | | | | ACTTGTATGCATTGCGAAT |
| | | | | | CGCATGAGATG |
| | | | | | (SEQ ID NO: 48) |
| gAMK- | MLKQINVIAGV | MLKQINVIAGV | HCIFIESCDVC | L5 | ATGCTGAAACAGATCAAC |
| 176 | KEPIRAYHCIFI | KEPIRAY | ELNEP | | GTGATAGCCGGGGTCAAA |
| | ESCDVCELNEP | (SEQ ID NO: 46) | (SEQ ID NO: 8) | | GAGCCCATTCGCGCATAT |
| | (SEQ ID NO: 28) | | | | CACTGCATTTTTATTGAAA |
| | | | | | GCTGTGACGTGTGCGAAC |
| | | | | | TGAATGAACCG |
| | | | | | (SEQ ID NO: 49) |
| gAMK- | MLKQINVIAGV | MLKQINVIAGV | KCEKREECAD | L5 | ATGCTGAAGCAAATCAAC |
| 177 | KEPIRAYKCEK | KEPIRAY | CDHLEF | | GTTATCGCCGGAGTTAAG |
| | REECADCDHLE | (SEQ ID NO: 46) | (SEQ ID NO: 9) | | GAACCTATTCGTGCGTATA |
| | F | | | | AATGTGAAAAACGGGAAG |
| | (SEQ ID NO: 29) | | | | AGTGTGCTGATTGCGATC |
| | | | | | ACCTTGAATTT |
| | | | | | (SEQ ID NO: 50) |
| gAMK- | MLKQINVIAGV | MLKQINVIAGV | KCTSKECCIQC | L5 | ATGCTGAAACAGATCAAC |
| 178 | KEPIRAYKCTS | KEPIRAY | EGSES | | GTCATTGCCGGCGTCAAA |
| | KECCIQCEGSE | (SEQ ID NO: 46) | (SEQ ID NO: | | GAACCAATCCGTGCTTAC |
| | S | | 10) | | AAGTGTACGTCAAAAGAA |
| | (SEQ ID NO: 30) | | | | TGCTGTATCCAGTGTGAA |
| | | | | | GGAAGTGAAAGC |
| | | | | | (SEQ ID NO: 51) |
| gAMK- | MLKQINVIAGV | MLKQINVIAGV | MCVFCEICVM | L5 | ATGTTAAAACAAATTAAC |
| 179 | KEPIRAYMCVF | KEPIRAY | CDTHEM | | GTGATCGCCGGGGTTAAA |
| | CEICVMCDTHE | (SEQ ID NO: 46) | (SEQ ID NO: | | GAACCCATCCGTGCGTAT |
| | M | | 11) | | ATGTGTGTATTTTGTGAAA |
| | (SEQ ID NO: 31) | | | | TTTGTGTGATGTGTGACAC |
| | | | | | CCATGAAATG |
| | | | | | (SEQ ID NO: 52) |
| gAMK- | MLKQINVIAGV | MLKQINVIAGV | PCGKREPCNT | L5 | ATGCTGAAGCAGATAAAT |
| 180 | KEPIRAYPCGK | KEPIRAY | CEHFET | | GTTATCGCGGGCGTCAAG |
| | REPCNTCEHFE | (SEQ ID NO: 46) | (SEQ ID NO: | | GAACCGATCCGTGCCTAT |
| | T | | 12) | | CCGTGTGGTAAACGCGAG |
| | (SEQ ID NO: 32) | | | | CCGTGTAATACCTGCGAA |
| | | | | | CATTTCGAAACG |
| | | | | | (SEQ ID NO: 53) |
| gAMK- | MLKQINVIAGV | MLKQINVIAGV | PCTTTEACTA | L5 | ATGCTGAAACAGATCAAC |
| 181 | KEPIRAYPCTT | KEPIRAY | CDSSDA | | GTCATTGCTGGTGTTAAAG |
| | TEACTACDSSD | (SEQ ID NO: 46) | (SEQ ID NO: | | AACCGATTCGCGCTTATCC |
| | A | | 13) | | GTGTACCACCACGGAAGC |
| | (SEQ ID NO: 33) | | | | GTGCACAGCCTGCGATTCT |
| | | | | | AGTGATGCG |
| | | | | | (SEQ ID NO: 54) |
| gAMK- | MLKQINVIAGV | MLKQINVIAGV | RCRCPENCLS | L5 | ATGCTGAAACAGATTAAC |
| 182 | KEPIRAYRCRC | KEPIRAY | CEPPER | | GTTATCGCGGGCGTCAAA |
| | PENCLSCEPPE | (SEQ ID NO: 46) | (SEQ ID NO: | | GAACCCATCAGAGCGTAT |
| | R | | 14) | | CGTTGTCGTTGCCCTGAGA |
| | (SEQ ID NO: 34) | | | | ACTGCCTGTCGTGCGAAC |
| | | | | | CGCCGGAGCGT |
| | | | | | (SEQ ID NO: 55) |
| gAMK- | MLKQINVIAGV | MLKQINVIAGV | SCTPDEVCPLC | L5 | ATGCTGAAGCAAATCAAT |
| 183 | KEPIRAYSCTP | KEPIRAY | EPCEP | | GTGATCGCGGGCGTTAAA |
| | DEVCPLCEPCE | (SEQ ID NO: 46) | (SEQ ID NO: | | GAGCCGATCCGGGCCTAC |
| | P | | 15) | | TCTTGTACCCCGGATGAA |
| | (SEQ ID NO: 35) | | | | GTATGTCCGCTCTGCGAGC |
| | | | | | CATGCGAACCG |
| | | | | | (SEQ ID NO: 56) |
| gAMK- | MLKQINVIAGV | MLKQINVIAGV | TCTMAEKCQI | L5 | ATGCTGAAGCAAATTAAC |
| 184 | KEPIRAYTCTM | KEPIRAY | CDVSEG | | GTGATTGCTGGTGTCAAG |
| | AEKCQICDVSE | (SEQ ID NO: 46) | (SEQ ID NO: | | GAACCTATCCGTGCGTAC |
| | G | | 16) | | ACATGTACGATGGCGGAG |
| | (SEQ ID NO: 36) | | | | AAATGCCAAATTTGCGAT |
| | | | | | GTGAGCGAAGGG |
| | | | | | (SEQ ID NO: 57) |
| gAMK- | MLKQINVIAGV | MLKQINVIAGV | ACTNPDPCTD | L3 | ATGCTCAAACAAATCAAC |
| 185 | KAPIRAYACTN | KAPIRAY | EEI | | GTGATCGCGGGAGTCAAA |
| | PDPCTDEEI | (SEQ ID NO: 46) | (SEQ ID NO: | | GCACCGATCCGCGCCTAC |
| | (SEQ ID NO: 37) | | 17) | | GCTTGCACAAACCCGGAC |
| | | | | | CCTTGCACGGATGAAGAA |
| | | | | | ATC |
| | | | | | (SEQ ID NO: 58) |
| gAMK- | MLKQINVIAGV | MLKQINVIAGV | PCEVLDNCTN | L3 | ATGCTTAAGCAGATAAAC |
| 186 | KAPIRAYPCEV | KAPIRAY | PDH | | GTGATCGCCGGCGTGAAA |
| | LDNCTNPDH | (SEQ ID NO: 46) | (SEQ ID NO: | | GCGCCGATCCGCGCGTAC |
| | (SEQ ID NO: 38) | | 18) | | CCGTGTGAAGTGTTGGAT |
| | | | | | AATTGCACAAATCCAGAC |
| | | | | | CAT |
| | | | | | (SEQ ID NO: 59) |
| gAMK- | MLKQINVIAGV | MLKQINVIAGV | ACTNPDPCTD | L3 | ATGCTGAAGCAAATCAAT |
| 187 | KEPIRAYACTN | KEPIRAY | EEI | | GTGATTGCCGGGGTAAAA |
| | PDPCTDEEI | (SEQ ID NO: 46) | (SEQ ID NO: | | GAACCGATACGCGCGTAC |
| | (SEQ ID NO: 39) | | 19) | | GCCTGTACTAACCCTGATC |
| | | | | | CGTGTACCGATGAGGAAA |
| | | | | | TC |
| | | | | | (SEQ ID NO: 60) |
| gAMK- | MLKQINVIAGV | MLKQINVIAGV | KCDEGDHCGT | L3 | ATGCTGAAACAGATTAAT |
| 188 | KEPIRAYKCDE | KEPIRAY | KDL | | GTGATTGCCGGAGTTAAG |
| | GDHCGTKDL | (SEQ ID NO: 46) | (SEQ ID NO: | | GAACCAATTCGCGCTTAT |
| | (SEQ ID NO: 40) | | 20) | | AAATGCGACGAAGGTGAT |
| | | | | | CATTGTGGCACTAAAGAT |
| | | | | | CTG |
| | | | | | (SEQ ID NO: 61) |
| gAMK- | MLKQINVIAGV | MLKQINVIAGV | PCEVLDNCTK | L3 | ATGCTGAAACAGATTAAT |
| 189 | KEPIRAYPCEV | KEPIRAY | PDH | | GTGATCGCGGGTGTAAAG |
| | LDNCTKPDH | (SEQ ID NO: 46) | (SEQ ID NO: | | GAACCGATCAGAGCGTAT |
| | (SEQ ID NO: 41) | | 21) | | CCATGCGAAGTTTTAGAC |
| | | | | | AACTGCACTAAACCCGAC |
| | | | | | CAC |
| | | | | | (SEQ ID NO: 62) |
| gAMK- | MLKQINVIAGV | MLKQINVIAGV | PCEVLDNCTN | L3 | ATGCTGAAACAAATTAAC |
| 190 | KEPIRAYPCEV | KEPIRAY | PDH | | GTTATTGCGGGTGTTAAA |
| | LDNCTNPDH | (SEQ ID NO: 46) | (SEQ ID NO: | | GAACCGATCCGTGCCTAT |
| | (SEQ ID NO: 42) | | 22) | | CCATGCGAGGTGTTGGAT |
| | | | | | AATTGCACCAACCCTGAT |
| | | | | | CAT |
| | | | | | (SEQ ID NO: 63) |
| gAMK- | MLKQINVIAGV | MLKQINVIAGV | QCPWHERCD | L3 | ATGTTAAAGCAGATCAAT |
| 191 | KEPIRAYQCPW | KEPIRAY | QCEP | | GTGATCGCAGGGGTGAAA |
| | HERCDQCEP | (SEQ ID NO: 46) | (SEQ ID NO: | | GAACCGATACGCGCATAC |
| | (SEQ ID NO: 43) | | 23) | | CAGTGCCCATGGCATGAA |
| | | | | | CGTTGTGATCAGTGCGAG |
| | | | | | CCG |
| | | | | | (SEQ ID NO: 64) |
| gAMK- | MLKQINVIAGV | MLKQINVIAGV | VCKYGEWCEI | L3 | ATGCTGAAGCAGATTAAC |
| 192 | KEPIRAYVCKY | KEPIRAY | VEI | | GTTATTGCCGGAGTTAAA |
| | GEWCEIVEI | (SEQ ID NO: 46) | (SEQ ID NO: | | GAACCCATACGCGCGTAC |
| | (SEQ ID NO: 44) | | 24) | | GTGTGTAAATATGGTGAA |
| | | | | | TGGTGTGAGATCGTCGAA |
| | | | | | ATC |
| | | | | | (SEQ ID NO: 65) |
| gAMK- | MLKQINVIAGV | MLKQINVIAGV | YCNITERCHS | L3 | ATGCTTAAACAAATTAAC |
| 193 | KEPIRAYYCNI | KEPIRAY | DEH | | GTGATCGCTGGTGTTAAG |
| | TERCHSDEH | (SEQ ID NO: 46) | (SEQ ID NO: | | GAACCGATCCGCGCGTAT |
| | (SEQ ID NO: 45) | | 25) | | TATTGCAATATCACCGAA |
| | | | | | CGCTGCCATTCGGATGAG |
| | | | | | CAT |
| | | | | | (SEQ ID NO: 66) |

[0782] The protein modification enzyme used with the sequences in Table 3 was PapB. The modification (mod) refers to the scaffold for the core peptide and correspond to L3 and L5 in FIG. 3.

TABLE 4
Non-limiting examples of protein modification enzyme sequences

| Protein | |
|---|---|
| modification | |
| enzyme | Amino acid sequence |
| LynD | MQSTPLLQIQPHFHVEVIEPKQVYLLGEQANHALTGQLYCQILPLLNGQYTLEQIVE |
| | KLDGEVPPEYIDYVLERLAEKGYLTEAAPELSSEVAAFWSELGIAPPVAAEALRQPV |
| | TLTPVGNISEVTVAALTTALRDIGISVQTPTEAGSPTALNVVLTDDYLQPELAKINKQ |
| | ALESQQTWLLVKPVGSVLWLGPVFVPGKTGCWDCLAHRLRGNREVEASVLRQKQ |
| | AQQQRNGQSGSVIGCLPTARATLPSTLQTGLQFAATEIAKWIVKYHVNATAPGTVF |
| | FPTLDGKIITLNHSILDLKSHILIKRSQCPTCGDPKILQHRGFEPLKLESRPKQFTSDGG |
| | HRGTTPEQTVQKYQHLISPVTGVVTELVRITDPANPLVHTYRAGHSFGSATSLRGLR |
| | NTLKHKSSGKGKTDSQSKASGLCEAVERYSGIFQGDEPRKRATLAELGDLAIHPEQC |
| | LCFSDGQYANRETLNEQATVAHDWIPQRFDASQAIEWTPVWSLTEQTHKYLPTALC |
| | YYHYPLPPEHRFARGDSNGNAAGNTLEEAILQGFMELVERDGVALWWYNRLRRPA |
| | VDLGSFNEPYFVQLQQFYRENDRDLWVLDLTADLGIPAFAGVSNRKTGSSERLILGF |
| | GAHLDPTIAILRAVTEVNQIGLELDKVPDENLKSDATDWLITEKLADHPYLLPDTTQ |
| | PLKTAQDYPKRWSDDIYTDVMTCVNIAQQAGLETLVIDQTRPDIGLNVVKVTVPG |
| | MRHFWSRFGEGRLYDVPVKLGWLDEPLTEAQMNPTPMPF (SEQ ID NO: 80) |
| PapB | MANLIQDREDELIHFHPYKLFEVDSKTFFYNVVTNAIFEIDSLIIDILHSKGKNEEHVV |
| | KDLAERYELSQVREAIQNMKEAYIIATDANISDVEKMGILDNSQRVFKLSSLTLFMV |
| | QECNLRCTYCYGEEGEYNQKGKMTSEIARSAVDFLIQQSGEIEQLNITFFGGEPLLNF |
| | PLIQETVQYVHEQSEIHNKKFSFSITTNGTLITPKIKNFFYKHHFAVQTSIDGDEKTHN |
| | FNRFFKGGQGSYDLLLKRTEEMRNDRKIGARGTVTPAELDLSKSFDHLVKLGFRKI |
| | YLSPALYSLSDDHYDTLSKEMVKLVEQFRELLEREDYVTAKKMSNVLGMLSKIHSG |
| | GPRIHFCGAGTNAAAVDVRGNLFPCHRFVGEDECSIGNLFDEDPLSKQYNFIENSTV |
| | RNRTTCSKCWAKNLCGGGCHQENFAENGNVNQPVGKLCKVTKNFINATINLYLQL |
| | TQEQRSILFG (SEQ ID NO: 81) |
| ProcM | MESPSSWKTSWLAAIAPDEPHKFDRRLEWDELSEENFFAALNSEPASLEEDDPCFEE |
| | ALQDALEALKAAWDLPLLPVDNNLNRPFVDVWWPIRCHSAESLRQSFVSDSAGLA |
| | DEIFDQLADSLLDRLCALGDQVLWEAFNKERTPGTMLLAHLGAAGDGSGPPVREH |
| | YERFIQSHRRNGLAPLLKEFPVLGRLIGTVLSLWFQGSVEMLQRICADRTVLQQCFA |
| | IPCGHHLKTVKQGLSDPHRGGRAVAVLEFADPNSTANSSMHVVYKPKDMAVDAA |
| | YQATLADLNTHSDLSPLRTLAIHNGNGYGYMEHVVHHLCANDKELTNFYFNAGRL |
| | TALLHLLGCTDCHHENLIACGDQLLLIDTETLLEADLPDHISDASSTTAQPKPSSLQK |
| | QFQRSVLRSGLLPQWMFLGESKLAIDISALGMSPPNKPERIALGWLGFNSDGMMPG |
| | RVSQPVEIPTSLPVGIGEVNPFDRFLEDFCDGFSMQSEALIKLRNRWLDVNGVLAHF |
| | AGLPRRIVLRATRVYFTIQRQQLEPTALRSPLAQALKLEQLTRSFLLAESKPLHWPIF |
| | AAEVKQMQHLDIPFFTHLIDADALQLGGLEQELPGFIQTSGLAAAYERLRNLDTDEI |
| | AFQLRLIRGAVEARELHTTPESSPTLPPPATPEALMSSSAETSLEAAKRIAHRLLELAI |
| | RDSQGQVEWLGMDLGADGESFSFGPVGLSLYGGSIGIAHLLQRLQAQQVSLMDAD |
| | AIQTAILQPLVGLVDQPSDDGRRRWWRDQPLGLSGCGGTLLALTLQGEQAMANSL |
| | LAAALPRFIEADQQLDLIGGCAGLIGSLVQLGTESALQLALRAGDHLIAQQNEEGA |
| | WSSSSSQPGLLGFSHGTAGYAAALAHLHAFSADERYRTAAAAALAYERARFNKDA |
| | GNWPDYRSIGRDSDSDEPSFMASWCHGAPGIALGRACLWGTALWDEECTKEIGIGL |
| | QTTAAVSSVSTDHLCCGSLGLMVLLEMLSAGPWPIDNQLRSHCQDVAFQYRLQAL |
| | QRCSAEPIKLRCFGTKEGLLVLPGFFTGLSGMGLALLEDDPSRAVVSQLISAGLWPT |
| | E (SEQ ID NO: 82) |
| TgnB | MKTILIITNTLDLTVDYIINRYNHTAKFFRLNTDRFFDYDINITNSGTSIRNRKSNLIINI |
| | QEIHSLYYRKITLPNLDGYESKYWTLMQREMMSIVEGIAETAGNFALTRPSVLRKA |
| | DNKIVQMKLAEEIGFILPQSLITNSNQAAASFCNKNNTSIVKPLSTGRILGKNKIGIIQT |
| | NLVETHENIQGLELSPAYFQDYIPKDTEIRLTIVGNKLFGANIKSTNQVDWRKNDAL |
| | LEYKPANIPDKIAKMCLEMMEKLEINFAAFDFIIRNGDYIFLELNANGQWLWLEDIL |
| | KFDISNTIINYLLGEPI (SEQ ID NO: 83) |

NpuDNAE intein C:
GFIASNCW (SEQ ID NO: 67)
NpuDNAE intein N:
CLSYETEILTVEYGLLPIGKIVEKRIECTVYSVDNNGNIYTQPVAQWHDRGEQEVFEYCLEDGSLIRATKD
HKFMTVDGQMLPIDEIFERELDLMRVDNLPNIKIATRKYLGKQNVYDIGVERDHNFALKN (SEQ ID NO:
68)
ECF20_992 C:
LDTRPAPDEQLEASAQSRRMAQALDQLPDRQREAIVLQYYQELSNTEAAALMQISVEALESLLSRARRN
LRSHLAEAPGADLSGRRKP (SEQ ID NO: 69)
ECF20_992 N:
NETDPDLELLKRIGNNDAQAVKEMVTRKLPRLLALASRLLGDADEARDIAQESFLRIWKQAASWRSEQA
RFDTWLHRVALNLCYDRLRRRKEHVPVDSEHACEA (SEQ ID NO: 70)
SARS-CoV-2 RBD:
RFPNITNLCPFGEVFNATRFASVYAWNRKRISNCVADYSVLYNSASFSTFKCYGVSPTKLNDLCFTNVYA
DSFVIRGDEVRQIAPGQTGKIADYNYKLPDDFTGCVIAWNSNNLDSKVGGNYNYLYRLFRKSNLKPFER
DISTEIYQAGSTPCNGVEGFNCYFPLQSYGFQPTNGVGYQPYRVVVLSFELLHAPATVCGPKKSTNL
(SEQID NO: 71)
ACE2a1:
STIEEQAKTFLDKFNHEAEDLFYQSSLASWNYNTNITE (SEQ ID NO: 72)
lbAMK-101 (plasmid encoding lanthipeptide RiPP library N-terminal to sigma-intein):
tgccacctgacgtctaagaaGAATTCGCGGCCGCTTCTAGAGGGAGccaattattgaaggcctccctaacggggggcctttttttgtttctggtc
tcccgcttaacgatcgttggctgacctgtaggatcgtacaggtTTACGcaagaaaatggtttgtTACAGTcgaataaaagctgtcaccggatgtgctttccggt
ctgatgagtccgtgaggacgaaacagcctctacaaataattttgtttaaTCCATCTCTATGGCGGATTTTatgtcatattaccaccatcaccatcatca
cATGTCAGAAGAACAACTCAAGGCATTCATTGCCAAGGTTCAAGCAGACACTTCACTGCAGGAACA
GCTCAAAGTAGAAGGTGCTGATGTTGTTGCTATTGCTAAAGCCTCAGGGTTCGCGATTACCACAGAG
CTGGCGGAGCTTTCTGAGGAGGCTCTGTCTGATGATGAGCTGGAGGGAGTCGCGGGAGGCGCGGCA
TGCNNKNNKNNKNNKNNKWCGATGCCGCCTWCGNNKNNKNNKNNKNNKTGCCGAggaggtAAGggagg
aCCTggaggtCGGggaggtGTTggaggtGGTggaggaATTggaggtGGTTTTATCGCTTCCAACTGCTGGCTGGATAC
CCGTCCGGCACCGGATGAACAGCTGGAAGCAAGCGCACAGAGCCGTCGTATGGCACAGGCACTGGA
TCAGCTGCCGGATCGTCAGCGTGAAGCAATTGTTCTGCAGTATTATCAAGAACTGAGCAATACCGAA
GCAGCAGCACTGATGCAAATTAGCGTTGAAGCCCTGGAAAGCCTGCTGAGCCGTGCACGTCGTAAT
CTGCGTAGCCATCTGGCCGAAGCACCGGGTGCAGATCTGAGCGGTCGTCGCAAACCGtaaaggtgatactttc
agccaaaaaacttaagaccgccggtcttgtccactaccttgcagtaatgcggtggacaggatcggcggttttcttttctcttctcaaAGACCgTCCAATGGC
GGCGCgccatcgaatggcgcaaaacctttcgcggtatggcatgatagcgcccggaagagagtcaattcagggtggtgaatatgaaaaacataaatgccgacga
cacatacagaataattaataaaattaaagcttgtagaagcaataatgatattaatcaatgcttatctgatatgactaaaatggtacattgtgaatattatttactcgcgatcattt
atcctcattctatggttaaatctgatatttcaatcctagataattaccctaaaaaatggaggcaatattatgatgacgctaatttaataaaatatgatcctatagtagattattcta
actccaatcattcaccaattaattggaatatatttgaaaacaatgctgtaaataaaaaatctccaaatgtaattaaagaagcgaaaacatcaggtcttatcactgggtttagtt
tccctattcatacggctaacaatggcttcggaatgcttagttttgcacattcagaaaaagacaactatatagatagtttatttttacatgcgtgtatgaacataccattaattgtt
ccttctctagttgataattatcgaaaaataaatatagcaaataataaatcaaacaacgatttaaccaaaagagaaaaagaatgtttagcgtgggcatgcgaaggaaaaag
ctcttgggatatttcaaaaatattaggttgcagtgagcgtactgtcactttccatttaaccaatgcgcaaatgaaactcaatacaacaaaccgctgccaaagtatttctaaa
gcaattttaacaggagcaattgattgcccatactttaaaaattgataaggatcctaattggtaacgaatcagacaattgacggctcgagggagtagcatagggtttgcag
aatccctgcttcgtccatttgacaggcacattatgcatcgatgataagctgtcaaacatgagcagatcctctacgccggacgcatcgtggccggcatcaccggcgcca
caggtgcggttgctggcgcctatatcgccgacatcaccgatggggaagatcgggctcgccacttcgggctcatgagcaaatattttatctggctcactcaaaggcggt
aatgacagtaagacgggtaagcctgttgatgataccgctgccttactgggtgcattagccagtctgaatgacctgtcacgggataatccgaagtggtcagactggaaa
atcagagggcaggaactgctgaacagcaaaaagtcagatagcaccacatagcagacccgccataaaacgccctgagaagcccgtgacgggcttttcttgtattatg
ggtagtttccttgcatgaatccataaaaggcgcctgtagtgccatttacccccattcactgccagagccgtgagcgcagcgaactgaatgtcacgaaaaagacagcga
ctcaggtgcctgatggtcggagacaaaaggaatattcagcgatttgcccgagcttgcgagggtgctacttaagcctttagggttttaaggtctgttttgtagaggagcaa
acagcgtttgcgacatccttttgtaatactgcggaactgactaaagtagtgagttatacacagggctgggatctattctttttatctttttttattctttctttattctataaattata
accacttgaatataaacaaaaaaaacacacaaaggtctagcggaatttacagagggtctagcagaatttacaagttttccagcaaaggtctagcagaatttacagatac
ccacaactcaaaggaaaaggactagtaattatcattgactagcccatctcaattggtatagtgattaaaatcacctagaccaattgagatgtatgtctgaattagttgttttc
aaagcaaatgaactagcgattagtcgctatgacttaacggagcatgaaaccaagctaattttatgctgtgtggcactactcaaccccacgattgaaaaccctacaagga
aagaacggacggtatcgttcacttataaccaatacgctcagatgatgaacatcagtagggaaaatgcttatggtgtattagctaaagcaaccagagagctgatgacga
gaactgtggaaatcaggaatcctttggttaaaggctttTGGattttccagtggacaaactatgccaagttctcaagcgaaaaattagaattagtttttagtgaagagatat
tgccttatcttttccagttaaaaaaattcataaaatataatctggaacatgttaagtcttttgaaaacaaatactctatgaggatttatgagtggttattaaaagaactaacaca
aaagaaaactcacaaggcaaatatagagattagccttgatgaatttaagttcatgttaatgcttgaaaataactaccatgagtttaaaaggcttaaccaatgggttttgaaa
ccaataagtaaagatttaaacacttacagcaatatgaaattggtggttgataagcgaggccgcccgactgatacgttgattttccaagttgaactagatagacaaatggat
ctcgtaaccgaacttgagaacaaccagataaaaatgaatggtgacaaaataccaacaaccattacatcagattcctacctacAtaacggactaagaaaaacactacac
gatgctttaactgcaaaaattcagctcaccagttttgaggcaaaatttttgagtgacatgcaaagtaagTatgatctcaatggttcgttctcatggctcacgcaaaaacaa
cgaaccacactagagaacatactggctaaatacggaaggatctgaggttcttatggctcttgtatctatcagtgaagcatcaagactaacaaacaaaagtagaacaact
gttcaccgttaCatatcaaagggaaaactgtccatatgcacagatgaaaacggtgtaaaaaagatagatacatcagagcttttacgagtttttggtgcattCaaagctgt
tcaccatgaacagatcgacaatgtaacagatgaacagcatgtaacacctaatagaacaggtgaaaccagtaaaacaaagcaactagaacatgaaattgaacacctga
gacaacttgttacagctcaacagtcacacatagacagcctgaaacaggcgatgctgcttatcgaatcaaagctgccgacaacacgggagccagtgacgcctcccgt
ggggaaaaaatcatggcaattctggaagaaatagCgctttcagccggcaaacCGGctgaagccggatctgcgattctgataacaaactagcaacaccagaacag
cccgtttgcgggcagcaaaacccgtacCGATTATCAAAAAGGATCTTCACCtagatccttttaaattaaaaatgaagttttaaatcaatctaaagt
atatatgagtaaacttggtctgacagttaccaatgcttaatcagtgaggcacctatctcagcgatctgtctatttcgttcatccatagttgcctgactccccgtcgtgtagata
actacgatacgggagggcttaccatctggccccagtgctgcaatgataccgcgagaAccacgctcaccggctccagatttatcagcaataaaccagccagccgga
agggccgagcgcagaagtggtcctgcaactttatccgcctccatccagtctattaattgttgccgggaagctagagtaagtagttcgccagttaatagtttgcgcaacgt
tgttgccattgctacaggcatcgtggtgtcacgctcgtcgtttggtatggcttcattcagctccggttcccaacgatcaaggcgagttacatgatcccccatgttgtgcaaa
aaagcggttagctccttcggtcctccgatcgttgtcagaagtaagttggccgcagtgttatcactcatggttatggcagcactgcataattctcttactgtcatgccatccgt
aagatgcttttctgtgactggtgagtactcaaccaagtcattctgagaatagtgtatgcggcgaccgagttgctcttgcccggcgtcaatacgggataataccgcgccac
atagcagaactttaaaagtgctcatcattggaaaacgttcttcggggcgaaaactctcaaggatcttaccgctgttgagatccagttcgatAtaacccactcgtgcaccc
aactgatcttcagcatcttttactttcaccagcgtttctgggtgagcaaaaacaggaaggcaaaatgccgcaaaaaagggaataagggcgacacggaaatgttgaata
ctcatactcttcctttttcaatattattgaagcatttatcagggttattgtctcatgagcggatacatatttgaatgtatttagaaaaataaacaaataggggttccgcgcacatt
tccccgaaaag (SEQ ID NO: 73)
lbAMK-102 (plasmid encoding microviridin RiPP library N-terminal to sigma-intein):
tgccacctgacgtctaagaaGAATTCGCGGCCGCTTCTAGAGGGAGccaattattgaaggcctccctaacggggggcctttttttgtttctggtc
tcccgcttaacgatcgttggctgacctgtaggatcgtacaggtTTACGcaagaaaatggtttgtTACAGTcgaataaaagctgtcaccggatgtgctttccggt
ctgatgagtccgtgaggacgaaacagcctctacaaataattttgtttaaTCCATCTCTATGGCGGATTTTatgtcatattaccaccatcaccatcatca
catgTATCGACCTTATATTGCCAAGTATGTCGAAGAACAAACTCTGCAGAATTCAACCAACCTGGTAT
ATGACGACATCACGCAGCTGGCGGAGCTTTCTGAGGAGGCTCTGGTGAAAAAAATTAATCTGNNKC
CCVANACTACGNNKNNKACTNNKDYKNTTGAGNNKNNKGACNNKGATGAGNNKNNKNNKCGAggag
gtAAGggaggaCCTggaggtCGGggaggtGTTggaggtGGTggaggaATTggaggtGGTTTTATCGCTTCCAACTGCTGG
CTGGATACCCGTCCGGCACCGGATGAACAGCTGGAAGCAAGCGCACAGAGCCGTCGTATGGCACAG
GCACTGGATCAGCTGCCGGATCGTCAGCGTGAAGCAATTGTTCTGCAGTATTATCAAGAACTGAGCA
ATACCGAAGCAGCAGCACTGATGCAAATTAGCGTTGAAGCCCTGGAAAGCCTGCTGAGCCGTGCAC
GTCGTAATCTGCGTAGCCATCTGGCCGAAGCACCGGGTGCAGATCTGAGCGGTCGTCGCAAACCGtaa
aggtgatactttcagccaaaaaacttaagaccgccggtcttgtccactaccttgcagtaatgcggtggacaggatcggcggttttcttttctcttctcaaAGACCgT
CCAATGGCGGCGCgccatcgaatggcgcaaaacctttcgcggtatggcatgatagcgcccggaagagagtcaattcagggtggtgaatatgaaaaacat
aaatgccgacgacacatacagaataattaataaaattaaagcttgtagaagcaataatgatattaatcaatgcttatctgatatgactaaaatggtacattgtgaatattattt
actcgcgatcatttatcctcattctatggttaaatctgatatttcaatcctagataattaccctaaaaaatggaggcaatattatgatgacgctaatttaataaaatatgatccta
tagtagattattctaactccaatcattcaccaattaattggaatatatttgaaaacaatgctgtaaataaaaaatctccaaatgtaattaaagaagcgaaaacatcaggtctta
tcactgggtttagtttccctattcatacggctaacaatggcttcggaatgcttagttttgcacattcagaaaaagacaactatatagatagtttatttttacatgcgtgtatgaa
cataccattaattgttccttctctagttgataattatcgaaaaataaatatagcaaataataaatcaaacaacgatttaaccaaaagagaaaaagaatgtttagcgtgggcat
gcgaaggaaaaagctcttgggatatttcaaaaatattaggttgcagtgagcgtactgtcactttccatttaaccaatgcgcaaatgaaactcaatacaacaaaccgctgc
caaagtatttctaaagcaattttaacaggagcaattgattgcccatactttaaaaattgataaggatcctaattggtaacgaatcagacaattgacggctcgagggagtag
catagggtttgcagaatccctgcttcgtccatttgacaggcacattatgcatcgatgataagctgtcaaacatgagcagatcctctacgccggacgcatcgtggccggc
atcaccggcgccacaggtgcggttgctggcgcctatatcgccgacatcaccgatggggaagatcgggctcgccacttcgggctcatgagcaaatattttatctggctc
actcaaaggcggtaatgacagtaagacgggtaagcctgttgatgataccgctgccttactgggtgcattagccagtctgaatgacctgtcacgggataatccgaagtg
gtcagactggaaaatcagagggcaggaactgctgaacagcaaaaagtcagatagcaccacatagcagacccgccataaaacgccctgagaagcccgtgacggg
cttttcttgtattatgggtagtttccttgcatgaatccataaaaggcgcctgtagtgccatttacccccattcactgccagagccgtgagcgcagcgaactgaatgtcacga
aaaagacagcgactcaggtgcctgatggtcggagacaaaaggaatattcagcgatttgcccgagcttgcgagggtgctacttaagcctttagggttttaaggtctgtttt
gtagaggagcaaacagcgtttgcgacatccttttgtaatactgcggaactgactaaagtagtgagttatacacagggctgggatctattctttttatctttttttattctttcttta
ttctataaattataaccacttgaatataaacaaaaaaaacacacaaaggtctagcggaatttacagagggtctagcagaatttacaagttttccagcaaaggtctagcaga
atttacagatacccacaactcaaaggaaaaggactagtaattatcattgactagcccatctcaattggtatagtgattaaaatcacctagaccaattgagatgtatgtctga
attagttgttttcaaagcaaatgaactagcgattagtcgctatgacttaacggagcatgaaaccaagctaattttatgctgtgtggcactactcaaccccacgattgaaaac
cctacaaggaaagaacggacggtatcgttcacttataaccaatacgctcagatgatgaacatcagtagggaaaatgcttatggtgtattagctaaagcaaccagagag
ctgatgacgagaactgtggaaatcaggaatcctttggttaaaggctttTGGattttccagtggacaaactatgccaagttctcaagcgaaaaattagaattagtttttagt
gaagagatattgccttatcttttccagttaaaaaaattcataaaatataatctggaacatgttaagtcttttgaaaacaaatactctatgaggatttatgagtggttattaaaag
aactaacacaaaagaaaactcacaaggcaaatatagagattagccttgatgaatttaagttcatgttaatgcttgaaaataactaccatgagtttaaaaggcttaaccaatg
ggttttgaaaccaataagtaaagatttaaacacttacagcaatatgaaattggtggttgataagcgaggccgcccgactgatacgttgattttccaagttgaactagatag
acaaatggatctcgtaaccgaacttgagaacaaccagataaaaatgaatggtgacaaaataccaacaaccattacatcagattcctacctacAtaacggactaagaaa
aacactacacgatgctttaactgcaaaaattcagctcaccagttttgaggcaaaatttttgagtgacatgcaaagtaagTatgatctcaatggttcgttctcatggctcacg
caaaaacaacgaaccacactagagaacatactggctaaatacggaaggatctgaggttcttatggctcttgtatctatcagtgaagcatcaagactaacaaacaaaagt
agaacaactgttcaccgttaCatatcaaagggaaaactgtccatatgcacagatgaaaacggtgtaaaaaagatagatacatcagagcttttacgagtttttggtgcatt
Caaagctgttcaccatgaacagatcgacaatgtaacagatgaacagcatgtaacacctaatagaacaggtgaaaccagtaaaacaaagcaactagaacatgaaattg
aacacctgagacaacttgttacagctcaacagtcacacatagacagcctgaaacaggcgatgctgcttatcgaatcaaagctgccgacaacacgggagccagtgac
gcctcccgtggggaaaaaatcatggcaattctggaagaaatagCgctttcagccggcaaacCGGctgaagccggatctgcgattctgataacaaactagcaacac
cagaacagcccgtttgcgggcagcaaaacccgtacCGATTATCAAAAAGGATCTTCACCtagatccttttaaattaaaaatgaagttttaaatca
atctaaagtatatatgagtaaacttggtctgacagttaccaatgcttaatcagtgaggcacctatctcagcgatctgtctatttcgttcatccatagttgcctgactccccgtc
gtgtagataactacgatacgggagggcttaccatctggccccagtgctgcaatgataccgcgagaAccacgctcaccggctccagatttatcagcaataaaccagc
cagccggaagggccgagcgcagaagtggtcctgcaactttatccgcctccatccagtctattaattgttgccgggaagctagagtaagtagttcgccagttaatagttt
gcgcaacgttgttgccattgctacaggcatcgtggtgtcacgctcgtcgtttggtatggcttcattcagctccggttcccaacgatcaaggcgagttacatgatcccccat
gttgtgcaaaaaagcggttagctccttcggtcctccgatcgttgtcagaagtaagttggccgcagtgttatcactcatggttatggcagcactgcataattctcttactgtc
atgccatccgtaagatgcttttctgtgactggtgagtactcaaccaagtcattctgagaatagtgtatgcggcgaccgagttgctcttgcccggcgtcaatacgggataat
accgcgccacatagcagaactttaaaagtgctcatcattggaaaacgttcttcggggcgaaaactctcaaggatcttaccgctgttgagatccagttcgatAtaaccca
ctcgtgcacccaactgatcttcagcatcttttactttcaccagcgtttctgggtgagcaaaaacaggaaggcaaaatgccgcaaaaaagggaataagggcgacacgg
aaatgttgaatactcatactcttcctttttcaatattattgaagcatttatcagggttattgtctcatgagcggatacatatttgaatgtatttagaaaaataaacaaataggggtt
ccgcgcacatttccccgaaaag (SEQ ID NO: 74)
lbAMK-103 (plasmid encoding ranthipeptide RiPP library v1 N-terminal to sigma-intein):
tgccacctgacgtctaagaaGAATTCGCGGCCGCTTCTAGAGGGAGccaattattgaaggcctccctaacggggggcctttttttgtttctggtc
tcccgcttaacgatcgttggctgacctgtaggatcgtacaggtTTACGcaagaaaatggtttgtTACAGTcgaataaaagctgtcaccggatgtgctttccggt
ctgatgagtccgtgaggacgaaacagcctctacaaataattttgtttaaTCCATCTCTATGGCGGATTTTatgtcatattaccaccatcaccatcatca
cATGTTGAAACAGATCAATGTGATTGCTGGCGTAAAAGAGCCTATTCGCGCCTATNNKTGTNNKNNK
NNKGAWNNKTGCNNKNNKNNKGAWNNKCGAggaggtAAGggaggaCCTggaggtCGGggaggtGTTggaggtGG
TggaggaATTggaggtGGTTTTATCGCTTCCAACTGCTGGCTGGATACCCGTCCGGCACCGGATGAACAGC
TGGAAGCAAGCGCACAGAGCCGTCGTATGGCACAGGCACTGGATCAGCTGCCGGATCGTCAGCGTG
AAGCAATTGTTCTGCAGTATTATCAAGAACTGAGCAATACCGAAGCAGCAGCACTGATGCAAATTA
GCGTTGAAGCCCTGGAAAGCCTGCTGAGCCGTGCACGTCGTAATCTGCGTAGCCATCTGGCCGAAGC
ACCGGGTGCAGATCTGAGCGGTCGTCGCAAACCGtaaaggtgatactttcagccaaaaaacttaagaccgccggtcttgtccactacc
ttgcagtaatgcggtggacaggatcggcggttttcttttctcttctcaaAGACCgTCCAATGGCGGCGCgccatcgaatggcgcaaaacctttcgcgg
tatggcatgatagcgcccggaagagagtcaattcagggtggtgaatatgaaaaacataaatgccgacgacacatacagaataattaataaaattaaagcttgtagaag
caataatgatattaatcaatgcttatctgatatgactaaaatggtacattgtgaatattatttactcgcgatcatttatcctcattctatggttaaatctgatatttcaatcctagata
attaccctaaaaaatggaggcaatattatgatgacgctaatttaataaaatatgatcctatagtagattattctaactccaatcattcaccaattaattggaatatatttgaaaa
caatgctgtaaataaaaaatctccaaatgtaattaaagaagcgaaaacatcaggtcttatcactgggtttagtttccctattcatacggctaacaatggcttcggaatgctta
gttttgcacattcagaaaaagacaactatatagatagtttatttttacatgcgtgtatgaacataccattaattgttccttctctagttgataattatcgaaaaataaatatagcaa
ataataaatcaaacaacgatttaaccaaaagagaaaaagaatgtttagcgtgggcatgcgaaggaaaaagctcttgggatatttcaaaaatattaggttgcagtgagcg
tactgtcactttccatttaaccaatgcgcaaatgaaactcaatacaacaaaccgctgccaaagtatttctaaagcaattttaacaggagcaattgattgcccatactttaaaa
attgataaggatcctaattggtaacgaatcagacaattgacggctcgagggagtagcatagggtttgcagaatccctgcttcgtccatttgacaggcacattatgcatcg
atgataagctgtcaaacatgagcagatcctctacgccggacgcatcgtggccggcatcaccggcgccacaggtgcggttgctggcgcctatatcgccgacatcacc
gatggggaagatcgggctcgccacttcgggctcatgagcaaatattttatctggctcactcaaaggcggtaatgacagtaagacgggtaagcctgttgatgataccgc
tgccttactgggtgcattagccagtctgaatgacctgtcacgggataatccgaagtggtcagactggaaaatcagagggcaggaactgctgaacagcaaaaagtcag
atagcaccacatagcagacccgccataaaacgccctgagaagcccgtgacgggcttttcttgtattatgggtagtttccttgcatgaatccataaaaggcgcctgtagtg
ccatttacccccattcactgccagagccgtgagcgcagcgaactgaatgtcacgaaaaagacagcgactcaggtgcctgatggtcggagacaaaaggaatattcag
cgatttgcccgagcttgcgagggtgctacttaagcctttagggttttaaggtctgttttgtagaggagcaaacagcgtttgcgacatccttttgtaatactgcggaactgac
taaagtagtgagttatacacagggctgggatctattctttttatctttttttattctttctttattctataaattataaccacttgaatataaacaaaaaaaacacacaaaggtctag
cggaatttacagagggtctagcagaatttacaagttttccagcaaaggtctagcagaatttacagatacccacaactcaaaggaaaaggactagtaattatcattgacta
gcccatctcaattggtatagtgattaaaatcacctagaccaattgagatgtatgtctgaattagttgttttcaaagcaaatgaactagcgattagtcgctatgacttaacgga
gcatgaaaccaagctaattttatgctgtgtggcactactcaaccccacgattgaaaaccctacaaggaaagaacggacggtatcgttcacttataaccaatacgctcag
atgatgaacatcagtagggaaaatgcttatggtgtattagctaaagcaaccagagagctgatgacgagaactgtggaaatcaggaatcctttggttaaaggctttTGG
attttccagtggacaaactatgccaagttctcaagcgaaaaattagaattagtttttagtgaagagatattgccttatcttttccagttaaaaaaattcataaaatataatctgg
aacatgttaagtcttttgaaaacaaatactctatgaggatttatgagtggttattaaaagaactaacacaaaagaaaactcacaaggcaaatatagagattagccttgatga
atttaagttcatgttaatgcttgaaaataactaccatgagtttaaaaggcttaaccaatgggttttgaaaccaataagtaaagatttaaacacttacagcaatatgaaattggt
ggttgataagcgaggccgcccgactgatacgttgattttccaagttgaactagatagacaaatggatctcgtaaccgaacttgagaacaaccagataaaaatgaatggt
gacaaaataccaacaaccattacatcagattcctacctacAtaacggactaagaaaaacactacacgatgctttaactgcaaaaattcagctcaccagttttgaggcaa
aatttttgagtgacatgcaaagtaagTatgatctcaatggttcgttctcatggctcacgcaaaaacaacgaaccacactagagaacatactggctaaatacggaaggat
ctgaggttcttatggctcttgtatctatcagtgaagcatcaagactaacaaacaaaagtagaacaactgttcaccgttaCatatcaaagggaaaactgtccatatgcaca
gatgaaaacggtgtaaaaaagatagatacatcagagcttttacgagtttttggtgcattCaaagctgttcaccatgaacagatcgacaatgtaacagatgaacagcatgt
aacacctaatagaacaggtgaaaccagtaaaacaaagcaactagaacatgaaattgaacacctgagacaacttgttacagctcaacagtcacacatagacagcctga
aacaggcgatgctgcttatcgaatcaaagctgccgacaacacgggagccagtgacgcctcccgtggggaaaaaatcatggcaattctggaagaaatagCgctttca
gccggcaaacCGGctgaagccggatctgcgattctgataacaaactagcaacaccagaacagcccgtttgcgggcagcaaaacccgtacCGATTATCA
AAAAGGATCTTCACCtagatccttttaaattaaaaatgaagttttaaatcaatctaaagtatatatgagtaaacttggtctgacagttaccaatgcttaatcagt
gaggcacctatctcagcgatctgtctatttcgttcatccatagttgcctgactccccgtcgtgtagataactacgatacgggagggcttaccatctggccccagtgctgca
atgataccgcgagaAccacgctcaccggctccagatttatcagcaataaaccagccagccggaagggccgagcgcagaagtggtcctgcaactttatccgcctcc
atccagtctattaattgttgccgggaagctagagtaagtagttcgccagttaatagtttgcgcaacgttgttgccattgctacaggcatcgtggtgtcacgctcgtcgtttg
gtatggcttcattcagctccggttcccaacgatcaaggcgagttacatgatcccccatgttgtgcaaaaaagcggttagctccttcggtcctccgatcgttgtcagaagta
agttggccgcagtgttatcactcatggttatggcagcactgcataattctcttactgtcatgccatccgtaagatgcttttctgtgactggtgagtactcaaccaagtcattct
gagaatagtgtatgcggcgaccgagttgctcttgcccggcgtcaatacgggataataccgcgccacatagcagaactttaaaagtgctcatcattggaaaacgttcttc
ggggcgaaaactctcaaggatcttaccgctgttgagatccagttcgatAtaacccactcgtgcacccaactgatcttcagcatcttttactttcaccagcgtttctgggtg
agcaaaaacaggaaggcaaaatgccgcaaaaaagggaataagggcgacacggaaatgttgaatactcatactcttcctttttcaatattattgaagcatttatcagggtt
attgtctcatgagcggatacatatttgaatgtatttagaaaaataaacaaataggggttccgcgcacatttccccgaaaag (SEQ ID NO: 75)
lbAMK-104 (plasmid encoding ranthipeptide RiPP library v2 N-terminal to sigma-intein):
tgccacctgacgtctaagaaGAATTCGCGGCCGCTTCTAGAGGGAGccaattattgaaggcctccctaacggggggcctttttttgtttctggtc
tcccgcttaacgatcgttggctgacctgtaggatcgtacaggtTTACGcaagaaaatggtttgtTACAGTcgaataaaagctgtcaccggatgtgctttccggt
ctgatgagtccgtgaggacgaaacagcctctacaaataattttgtttaaTCCATCTCTATGGCGGATTTTatgtcatattaccaccatcaccatcatca
cATGTTGAAACAGATCAATGTGATTGCTGGCGTAAAAGAGCCTATTCGCGCCTATNNKTGCNNKNNK
TGCGAWNNKNNKGAWNNKNNKCGAggaggtAAGggaggaCCTggaggtCGGggaggtGTTggaggtGGTggaggaAT
TggaggtGGTTTTATCGCTTCCAACTGCTGGCTGGATACCCGTCCGGCACCGGATGAACAGCTGGAAGC
AAGCGCACAGAGCCGTCGTATGGCACAGGCACTGGATCAGCTGCCGGATCGTCAGCGTGAAGCAAT
TGTTCTGCAGTATTATCAAGAACTGAGCAATACCGAAGCAGCAGCACTGATGCAAATTAGCGTTGA
AGCCCTGGAAAGCCTGCTGAGCCGTGCACGTCGTAATCTGCGTAGCCATCTGGCCGAAGCACCGGG
TGCAGATCTGAGCGGTCGTCGCAAACCGtaaaggtgatactttcagccaaaaaacttaagaccgccggtcttgtccactaccttgcagtaat
gcggtggacaggatcggcggttttcttttctcttctcaaAGACCgTCCAATGGCGGCGCgccatcgaatggcgcaaaacctttcgcggtatggcatga
tagcgcccggaagagagtcaattcagggtggtgaatatgaaaaacataaatgccgacgacacatacagaataattaataaaattaaagcttgtagaagcaataatgat
attaatcaatgcttatctgatatgactaaaatggtacattgtgaatattatttactcgcgatcatttatcctcattctatggttaaatctgatatttcaatcctagataattaccctaa
aaaatggaggcaatattatgatgacgctaatttaataaaatatgatcctatagtagattattctaactccaatcattcaccaattaattggaatatatttgaaaacaatgctgta
aataaaaaatctccaaatgtaattaaagaagcgaaaacatcaggtcttatcactgggtttagtttccctattcatacggctaacaatggcttcggaatgcttagttttgcaca
ttcagaaaaagacaactatatagatagtttatttttacatgcgtgtatgaacataccattaattgttccttctctagttgataattatcgaaaaataaatatagcaaataataaat
caaacaacgatttaaccaaaagagaaaaagaatgtttagcgtgggcatgcgaaggaaaaagctcttgggatatttcaaaaatattaggttgcagtgagcgtactgtcac
tttccatttaaccaatgcgcaaatgaaactcaatacaacaaaccgctgccaaagtatttctaaagcaattttaacaggagcaattgattgcccatactttaaaaattgataag
gatcctaattggtaacgaatcagacaattgacggctcgagggagtagcatagggtttgcagaatccctgcttcgtccatttgacaggcacattatgcatcgatgataagc
tgtcaaacatgagcagatcctctacgccggacgcatcgtggccggcatcaccggcgccacaggtgcggttgctggcgcctatatcgccgacatcaccgatgggga
agatcgggctcgccacttcgggctcatgagcaaatattttatctggctcactcaaaggcggtaatgacagtaagacgggtaagcctgttgatgataccgctgccttactg
ggtgcattagccagtctgaatgacctgtcacgggataatccgaagtggtcagactggaaaatcagagggcaggaactgctgaacagcaaaaagtcagatagcacca
catagcagacccgccataaaacgccctgagaagcccgtgacgggcttttcttgtattatgggtagtttccttgcatgaatccataaaaggcgcctgtagtgccatttacc
cccattcactgccagagccgtgagcgcagcgaactgaatgtcacgaaaaagacagcgactcaggtgcctgatggtcggagacaaaaggaatattcagcgatttgcc
cgagcttgcgagggtgctacttaagcctttagggttttaaggtctgttttgtagaggagcaaacagcgtttgcgacatccttttgtaatactgcggaactgactaaagtagt
gagttatacacagggctgggatctattctttttatctttttttattctttctttattctataaattataaccacttgaatataaacaaaaaaaacacacaaaggtctagcggaattta
cagagggtctagcagaatttacaagttttccagcaaaggtctagcagaatttacagatacccacaactcaaaggaaaaggactagtaattatcattgactagcccatctc
aattggtatagtgattaaaatcacctagaccaattgagatgtatgtctgaattagttgttttcaaagcaaatgaactagcgattagtcgctatgacttaacggagcatgaaac
caagctaattttatgctgtgtggcactactcaaccccacgattgaaaaccctacaaggaaagaacggacggtatcgttcacttataaccaatacgctcagatgatgaaca
tcagtagggaaaatgcttatggtgtattagctaaagcaaccagagagctgatgacgagaactgtggaaatcaggaatcctttggttaaaggctttTGGattttccagtg
gacaaactatgccaagttctcaagcgaaaaattagaattagtttttagtgaagagatattgccttatcttttccagttaaaaaaattcataaaatataatctggaacatgttaa
gtcttttgaaaacaaatactctatgaggatttatgagtggttattaaaagaactaacacaaaagaaaactcacaaggcaaatatagagattagccttgatgaatttaagttc
atgttaatgcttgaaaataactaccatgagtttaaaaggcttaaccaatgggttttgaaaccaataagtaaagatttaaacacttacagcaatatgaaattggtggttgataa
gcgaggccgcccgactgatacgttgattttccaagttgaactagatagacaaatggatctcgtaaccgaacttgagaacaaccagataaaaatgaatggtgacaaaat
accaacaaccattacatcagattcctacctacAtaacggactaagaaaaacactacacgatgctttaactgcaaaaattcagctcaccagttttgaggcaaaatttttgag
tgacatgcaaagtaagTatgatctcaatggttcgttctcatggctcacgcaaaaacaacgaaccacactagagaacatactggctaaatacggaaggatctgaggttc
ttatggctcttgtatctatcagtgaagcatcaagactaacaaacaaaagtagaacaactgttcaccgttaCatatcaaagggaaaactgtccatatgcacagatgaaaac
ggtgtaaaaaagatagatacatcagagcttttacgagtttttggtgcattCaaagctgttcaccatgaacagatcgacaatgtaacagatgaacagcatgtaacacctaa
tagaacaggtgaaaccagtaaaacaaagcaactagaacatgaaattgaacacctgagacaacttgttacagctcaacagtcacacatagacagcctgaaacaggcg
atgctgcttatcgaatcaaagctgccgacaacacgggagccagtgacgcctcccgtggggaaaaaatcatggcaattctggaagaaatagCgctttcagccggcaa
acCGGctgaagccggatctgcgattctgataacaaactagcaacaccagaacagcccgtttgcgggcagcaaaacccgtacCGATTATCAAAAAG
GATCTTCACCtagatccttttaaattaaaaatgaagttttaaatcaatctaaagtatatatgagtaaacttggtctgacagttaccaatgcttaatcagtgaggcacc
tatctcagcgatctgtctatttcgttcatccatagttgcctgactccccgtcgtgtagataactacgatacgggagggcttaccatctggccccagtgctgcaatgataccg
cgagaAccacgctcaccggctccagatttatcagcaataaaccagccagccggaagggccgagcgcagaagtggtcctgcaactttatccgcctccatccagtcta
ttaattgttgccgggaagctagagtaagtagttcgccagttaatagtttgcgcaacgttgttgccattgctacaggcatcgtggtgtcacgctcgtcgtttggtatggcttca
ttcagctccggttcccaacgatcaaggcgagttacatgatcccccatgttgtgcaaaaaagcggttagctccttcggtcctccgatcgttgtcagaagtaagttggccgc
agtgttatcactcatggttatggcagcactgcataattctcttactgtcatgccatccgtaagatgcttttctgtgactggtgagtactcaaccaagtcattctgagaatagtg
tatgcggcgaccgagttgctcttgcccggcgtcaatacgggataataccgcgccacatagcagaactttaaaagtgctcatcattggaaaacgttcttcggggcgaaa
actctcaaggatcttaccgctgttgagatccagttcgatAtaacccactcgtgcacccaactgatcttcagcatcttttactttcaccagcgtttctgggtgagcaaaaaca
ggaaggcaaaatgccgcaaaaaagggaataagggcgacacggaaatgttgaatactcatactcttcctttttcaatattattgaagcatttatcagggttattgtctcatga
gcggatacatatttgaatgtatttagaaaaataaacaaataggggttccgcgcacatttccccgaaaag (SEQ ID NO: 76)
lbAMK-105 (plasmid encoding ranthipeptide RiPP library v3 N-terminal to sigma-intein):
tgccacctgacgtctaagaaGAATTCGCGGCCGCTTCTAGAGGGAGccaattattgaaggcctccctaacggggggcctttttttgtttctggtc
tcccgcttaacgatcgttggctgacctgtaggatcgtacaggtTTACGcaagaaaatggtttgtTACAGTcgaataaaagctgtcaccggatgtgctttccggt
ctgatgagtccgtgaggacgaaacagcctctacaaataattttgtttaaTCCATCTCTATGGCGGATTTTatgtcatattaccaccatcaccatcatca
cATGTTGAAACAGATCAATGTGATTGCTGGCGTAAAAGAGCCTATTCGCGCCTATNNKTGTNNKNNK
NNKGAWNNKTGCNNKNNKTGCGAWNNKNNKGAWNNKCGAggaggtAAGggaggaCCTggaggtCGGggaggt
GTTggaggtGGTggaggaATTggaggtGGTTTTATCGCTTCCAACTGCTGGCTGGATACCCGTCCGGCACCGG
ATGAACAGCTGGAAGCAAGCGCACAGAGCCGTCGTATGGCACAGGCACTGGATCAGCTGCCGGATC
GTCAGCGTGAAGCAATTGTTCTGCAGTATTATCAAGAACTGAGCAATACCGAAGCAGCAGCACTGA
TGCAAATTAGCGTTGAAGCCCTGGAAAGCCTGCTGAGCCGTGCACGTCGTAATCTGCGTAGCCATCT
GGCCGAAGCACCGGGTGCAGATCTGAGCGGTCGTCGCAAACCGtaaaggtgatactttcagccaaaaaacttaagaccgcc
ggtcttgtccactaccttgcagtaatgcggtggacaggatcggcggttttcttttctcttctcaaAGACCgTCCAATGGCGGCGCgccatcgaatggcg
caaaacctttcgcggtatggcatgatagcgcccggaagagagtcaattcagggtggtgaatatgaaaaacataaatgccgacgacacatacagaataattaataaaat
taaagcttgtagaagcaataatgatattaatcaatgcttatctgatatgactaaaatggtacattgtgaatattatttactcgcgatcatttatcctcattctatggttaaatctga
tatttcaatcctagataattaccctaaaaaatggaggcaatattatgatgacgctaatttaataaaatatgatcctatagtagattattctaactccaatcattcaccaattaatt
ggaatatatttgaaaacaatgctgtaaataaaaaatctccaaatgtaattaaagaagcgaaaacatcaggtcttatcactgggtttagtttccctattcatacggctaacaat
ggcttcggaatgcttagttttgcacattcagaaaaagacaactatatagatagtttatttttacatgcgtgtatgaacataccattaattgttccttctctagttgataattatcga
aaaataaatatagcaaataataaatcaaacaacgatttaaccaaaagagaaaaagaatgtttagcgtgggcatgcgaaggaaaaagctcttgggatatttcaaaaatatt
aggttgcagtgagcgtactgtcactttccatttaaccaatgcgcaaatgaaactcaatacaacaaaccgctgccaaagtatttctaaagcaattttaacaggagcaattga
ttgcccatactttaaaaattgataaggatcctaattggtaacgaatcagacaattgacggctcgagggagtagcatagggtttgcagaatccctgcttcgtccatttgaca
ggcacattatgcatcgatgataagctgtcaaacatgagcagatcctctacgccggacgcatcgtggccggcatcaccggcgccacaggtgcggttgctggcgcctat
atcgccgacatcaccgatggggaagatcgggctcgccacttcgggctcatgagcaaatattttatctggctcactcaaaggcggtaatgacagtaagacgggtaagc
ctgttgatgataccgctgccttactgggtgcattagccagtctgaatgacctgtcacgggataatccgaagtggtcagactggaaaatcagagggcaggaactgctga
acagcaaaaagtcagatagcaccacatagcagacccgccataaaacgccctgagaagcccgtgacgggcttttcttgtattatgggtagtttccttgcatgaatccata
aaaggcgcctgtagtgccatttacccccattcactgccagagccgtgagcgcagcgaactgaatgtcacgaaaaagacagcgactcaggtgcctgatggtcggaga
caaaaggaatattcagcgatttgcccgagcttgcgagggtgctacttaagcctttagggttttaaggtctgttttgtagaggagcaaacagcgtttgcgacatccttttgta
atactgcggaactgactaaagtagtgagttatacacagggctgggatctattctttttatctttttttattctttctttattctataaattataaccacttgaatataaacaaaaaaa
acacacaaaggtctagcggaatttacagagggtctagcagaatttacaagttttccagcaaaggtctagcagaatttacagatacccacaactcaaaggaaaaggact
agtaattatcattgactagcccatctcaattggtatagtgattaaaatcacctagaccaattgagatgtatgtctgaattagttgttttcaaagcaaatgaactagcgattagt
cgctatgacttaacggagcatgaaaccaagctaattttatgctgtgtggcactactcaaccccacgattgaaaaccctacaaggaaagaacggacggtatcgttcactt
ataaccaatacgctcagatgatgaacatcagtagggaaaatgcttatggtgtattagctaaagcaaccagagagctgatgacgagaactgtggaaatcaggaatccttt
ggttaaaggctttTGGattttccagtggacaaactatgccaagttctcaagcgaaaaattagaattagtttttagtgaagagatattgccttatcttttccagttaaaaaaat
tcataaaatataatctggaacatgttaagtcttttgaaaacaaatactctatgaggatttatgagtggttattaaaagaactaacacaaaagaaaactcacaaggcaaatat
agagattagccttgatgaatttaagttcatgttaatgcttgaaaataactaccatgagtttaaaaggcttaaccaatgggttttgaaaccaataagtaaagatttaaacactta
cagcaatatgaaattggtggttgataagcgaggccgcccgactgatacgttgattttccaagttgaactagatagacaaatggatctcgtaaccgaacttgagaacaac
cagataaaaatgaatggtgacaaaataccaacaaccattacatcagattcctacctacAtaacggactaagaaaaacactacacgatgctttaactgcaaaaattcagc
tcaccagttttgaggcaaaatttttgagtgacatgcaaagtaagTatgatctcaatggttcgttctcatggctcacgcaaaaacaacgaaccacactagagaacatactg
gctaaatacggaaggatctgaggttcttatggctcttgtatctatcagtgaagcatcaagactaacaaacaaaagtagaacaactgttcaccgttaCatatcaaagggaa
aactgtccatatgcacagatgaaaacggtgtaaaaaagatagatacatcagagcttttacgagtttttggtgcattCaaagctgttcaccatgaacagatcgacaatgta
acagatgaacagcatgtaacacctaatagaacaggtgaaaccagtaaaacaaagcaactagaacatgaaattgaacacctgagacaacttgttacagctcaacagtc
acacatagacagcctgaaacaggcgatgctgcttatcgaatcaaagctgccgacaacacgggagccagtgacgcctcccgtggggaaaaaatcatggcaattctgg
aagaaatagCgctttcagccggcaaacCGGctgaagccggatctgcgattctgataacaaactagcaacaccagaacagcccgtttgcgggcagcaaaacccgt
acCGATTATCAAAAAGGATCTTCACCtagatccttttaaattaaaaatgaagttttaaatcaatctaaagtatatatgagtaaacttggtctgacagtt
accaatgcttaatcagtgaggcacctatctcagcgatctgtctatttcgttcatccatagttgcctgactccccgtcgtgtagataactacgatacgggagggcttaccatc
tggccccagtgctgcaatgataccgcgagaAccacgctcaccggctccagatttatcagcaataaaccagccagccggaagggccgagcgcagaagtggtcctg
caactttatccgcctccatccagtctattaattgttgccgggaagctagagtaagtagttcgccagttaatagtttgcgcaacgttgttgccattgctacaggcatcgtggt
gtcacgctcgtcgtttggtatggcttcattcagctccggttcccaacgatcaaggcgagttacatgatcccccatgttgtgcaaaaaagcggttagctccttcggtcctcc
gatcgttgtcagaagtaagttggccgcagtgttatcactcatggttatggcagcactgcataattctcttactgtcatgccatccgtaagatgcttttctgtgactggtgagt
actcaaccaagtcattctgagaatagtgtatgcggcgaccgagttgctcttgcccggcgtcaatacgggataataccgcgccacatagcagaactttaaaagtgctcat
cattggaaaacgttcttcggggcgaaaactctcaaggatcttaccgctgttgagatccagttcgatAtaacccactcgtgcacccaactgatcttcagcatcttttactttc
accagcgtttctgggtgagcaaaaacaggaaggcaaaatgccgcaaaaaagggaataagggcgacacggaaatgttgaatactcatactcttcctttttcaatattatt
gaagcatttatcagggttattgtctcatgagcggatacatatttgaatgtatttagaaaaataaacaaataggggttccgcgcacatttccccgaaaag (SEQ ID
NO: 77)
pAMK-857 (plasmid encoding ACE2a1 N-terminal to sigma-intein):
tgccacctgacgtctaagaaGAATTCGCGGCCGCTTCTAGAGGGAGccaattattgaaggcctccctaacggggggcctttttttgtttctggtc
tcccgcttaacgatcgttggctgacctgtaggatcgtacaggtTTACGcaagaaaatggtttgtTACAGTcgaataaaagctgtcaccggatgtgctttccggt
ctgatgagtccgtgaggacgaaacagcctctacaaataattttgtttaaTCCATCTCTATGGCGGATTTTatgtcatattaccaccatcaccatcatca
cATGtcaacgatcgaagaacaggctaaaacgttcctggataagttcaatcatgaggcggaggacctgttctaccaaagcagcttggcctcttggaactacaacacg
aacattacggagCGAggaggtAAGggaggaCCTggaggtCGGggaggtGTTggaggtGGTggaggaATTggaggtGGTTTTATCG
CTTCCAACTGCTGGCTGGATACCCGTCCGGCACCGGATGAACAGCTGGAAGCAAGCGCACAGAGCC
GTCGTATGGCACAGGCACTGGATCAGCTGCCGGATCGTCAGCGTGAAGCAATTGTTCTGCAGTATTA
TCAAGAACTGAGCAATACCGAAGCAGCAGCACTGATGCAAATTAGCGTTGAAGCCCTGGAAAGCCT
GCTGAGCCGTGCACGTCGTAATCTGCGTAGCCATCTGGCCGAAGCACCGGGTGCAGATCTGAGCGG
TCGTCGCAAACCGtaaaggtgatactttcagccaaaaaacttaagaccgccggtcttgtccactaccttgcagtaatgcggtggacaggatcggcggttttc
ttttctcttctcaaAGACCgTCCAATGGCGGCGCgccatcgaatggcgcaaaacctttcgcggtatggcatgatagcgcccggaagagagtcaattc
agggtggtgaatatgaaaaacataaatgccgacgacacatacagaataattaataaaattaaagcttgtagaagcaataatgatattaatcaatgcttatctgatatgacta
aaatggtacattgtgaatattatttactcgcgatcatttatcctcattctatggttaaatctgatatttcaatcctagataattaccctaaaaaatggaggcaatattatgatgac
gctaatttaataaaatatgatcctatagtagattattctaactccaatcattcaccaattaattggaatatatttgaaaacaatgctgtaaataaaaaatctccaaatgtaattaa
agaagcgaaaacatcaggtcttatcactgggtttagtttccctattcatacggctaacaatggcttcggaatgcttagttttgcacattcagaaaaagacaactatatagat
agtttatttttacatgcgtgtatgaacataccattaattgttccttctctagttgataattatcgaaaaataaatatagcaaataataaatcaaacaacgatttaaccaaaagag
aaaaagaatgtttagcgtgggcatgcgaaggaaaaagctcttgggatatttcaaaaatattaggttgcagtgagcgtactgtcactttccatttaaccaatgcgcaaatga
aactcaatacaacaaaccgctgccaaagtatttctaaagcaattttaacaggagcaattgattgcccatactttaaaaattgataaggatcctaattggtaacgaatcagac
aattgacggctcgagggagtagcatagggtttgcagaatccctgcttcgtccatttgacaggcacattatgcatcgatgataagctgtcaaacatgagcagatcctctac
gccggacgcatcgtggccggcatcaccggcgccacaggtgcggttgctggcgcctatatcgccgacatcaccgatggggaagatcgggctcgccacttcgggctc
atgagcaaatattttatctggctcactcaaaggcggtaatgacagtaagacgggtaagcctgttgatgataccgctgccttactgggtgcattagccagtctgaatgacc
tgtcacgggataatccgaagtggtcagactggaaaatcagagggcaggaactgctgaacagcaaaaagtcagatagcaccacatagcagacccgccataaaacgc
cctgagaagcccgtgacgggcttttcttgtattatgggtagtttccttgcatgaatccataaaaggcgcctgtagtgccatttacccccattcactgccagagccgtgagc
gcagcgaactgaatgtcacgaaaaagacagcgactcaggtgcctgatggtcggagacaaaaggaatattcagcgatttgcccgagcttgcgagggtgctacttaag
cctttagggttttaaggtctgttttgtagaggagcaaacagcgtttgcgacatccttttgtaatactgcggaactgactaaagtagtgagttatacacagggctgggatcta
ttctttttatctttttttattctttctttattctataaattataaccacttgaatataaacaaaaaaaacacacaaaggtctagcggaatttacagagggtctagcagaatttacaag
ttttccagcaaaggtctagcagaatttacagatacccacaactcaaaggaaaaggactagtaattatcattgactagcccatctcaattggtatagtgattaaaatcaccta
gaccaattgagatgtatgtctgaattagttgttttcaaagcaaatgaactagcgattagtcgctatgacttaacggagcatgaaaccaagctaattttatgctgtgtggcact
actcaaccccacgattgaaaaccctacaaggaaagaacggacggtatcgttcacttataaccaatacgctcagatgatgaacatcagtagggaaaatgcttatggtgta
ttagctaaagcaaccagagagctgatgacgagaactgtggaaatcaggaatcctttggttaaaggctttTGGattttccagtggacaaactatgccaagttctcaagc
gaaaaattagaattagtttttagtgaagagatattgccttatcttttccagttaaaaaaattcataaaatataatctggaacatgttaagtcttttgaaaacaaatactctatgag
gatttatgagtggttattaaaagaactaacacaaaagaaaactcacaaggcaaatatagagattagccttgatgaatttaagttcatgttaatgcttgaaaataactaccat
gagtttaaaaggcttaaccaatgggttttgaaaccaataagtaaagatttaaacacttacagcaatatgaaattggtggttgataagcgaggccgcccgactgatacgtt
gattttccaagttgaactagatagacaaatggatctcgtaaccgaacttgagaacaaccagataaaaatgaatggtgacaaaataccaacaaccattacatcagattcct
acctacAtaacggactaagaaaaacactacacgatgctttaactgcaaaaattcagctcaccagttttgaggcaaaatttttgagtgacatgcaaagtaagTatgatctc
aatggttcgttctcatggctcacgcaaaaacaacgaaccacactagagaacatactggctaaatacggaaggatctgaggttcttatggctcttgtatctatcagtgaag
catcaagactaacaaacaaaagtagaacaactgttcaccgttaCatatcaaagggaaaactgtccatatgcacagatgaaaacggtgtaaaaaagatagatacatcag
agcttttacgagtttttggtgcattCaaagctgttcaccatgaacagatcgacaatgtaacagatgaacagcatgtaacacctaatagaacaggtgaaaccagtaaaac
aaagcaactagaacatgaaattgaacacctgagacaacttgttacagctcaacagtcacacatagacagcctgaaacaggcgatgctgcttatcgaatcaaagctgcc
gacaacacgggagccagtgacgcctcccgtggggaaaaaatcatggcaattctggaagaaatagCgctttcagccggcaaacCGGctgaagccggatctgcg
attctgataacaaactagcaacaccagaacagcccgtttgcgggcagcaaaacccgtacCGATTATCAAAAAGGATCTTCACCtagatcctttt
aaattaaaaatgaagttttaaatcaatctaaagtatatatgagtaaacttggtctgacagttaccaatgcttaatcagtgaggcacctatctcagcgatctgtctatttcgttca
tccatagttgcctgactccccgtcgtgtagataactacgatacgggagggcttaccatctggccccagtgctgcaatgataccgcgagaAccacgctcaccggctcc
agatttatcagcaataaaccagccagccggaagggccgagcgcagaagtggtcctgcaactttatccgcctccatccagtctattaattgttgccgggaagctagagt
aagtagttcgccagttaatagtttgcgcaacgttgttgccattgctacaggcatcgtggtgtcacgctcgtcgtttggtatggcttcattcagctccggttcccaacgatca
aggcgagttacatgatcccccatgttgtgcaaaaaagcggttagctccttcggtcctccgatcgttgtcagaagtaagttggccgcagtgttatcactcatggttatggca
gcactgcataattctcttactgtcatgccatccgtaagatgcttttctgtgactggtgagtactcaaccaagtcattctgagaatagtgtatgcggcgaccgagttgctcttg
cccggcgtcaatacgggataataccgcgccacatagcagaactttaaaagtgctcatcattggaaaacgttcttcggggcgaaaactctcaaggatcttaccgctgttg
agatccagttcgatAtaacccactcgtgcacccaactgatcttcagcatcttttactttcaccagcgtttctgggtgagcaaaaacaggaaggcaaaatgccgcaaaaa
agggaataagggcgacacggaaatgttgaatactcatactcttcctttttcaatattattgaagcatttatcagggttattgtctcatgagcggatacatatttgaatgtattta
gaaaaataaacaaataggggttccgcgcacatttccccgaaaag (SEQ ID NO: 78)
pAMK-876 (plasmid encoding RBD C-terminal to sigma-intein; ECF promoter driving expression of cat-GFP and
hsvtk-RFP):
cgattatcaaaaaggatcttcacctagatccttttaaattaaaaatgaagttttaaatcaatctaaagtatatatgagtaaacttggtctgacagttatcagaagaactcgtca
agaaggcgatagaaggcgatgcgctgcgaatcgggagcggcgataccgtaaagcacgaggaagcggtcagcccattcgccgccaagctcttcagcaatatcacg
ggtagccaacgctatgtcctgatagcggtccgccacacccagccggccacagtcgatgaatccagaaaagcggccattttccaccatgatattcggcaagcaggcat
cgccatgggtcacgacgagatcctcgccgtcgggcatgcgcgccttgagcctggcgaacagttcggctggcgcgagcccctgatgctcttcgtccagatcatcctg
atcgacaagaccggcttccatccgagtacgtgctcgctcgatgcgatgtttcgcttggtggtcgaatgggcaggtagccggatcaagcgtatgcagccgccgcattg
catcagccatgatggatactttctcggcaggagcaaggtgagatgacaggagatcctgccccggcacttcgcccaatagcagccagtcccttcccgcttcagtgaca
acgtcgagcacagctgcgcaaggaacgcccgtcgtggccagccacgatagccgcgctgcctcgtcctgcagttcattcagggcaccggacaggtcggtcttgaca
aaaagaaccgggcgcccctgcgctgacagccggaacacggcggcatcagagcagccgattgtctgttgtgcccagtcatagccgaatagcctctccacccaagcg
gccggagaacctgcgtgcaatccatcttgttcaatcatgcgaaacgatcctcaatattattgaagcatttatcagggttattgtctcatgagcggatacatatttgaatgtatt
tagaaaaataaacaaataggggttccgcgcacatttccccgaaaagtgccacctgacgtctaagaaaccattattatcatgacattaacctataaaaataggcgtatcac
gaggcagaatttcagataaaaaaaatccttagctttcgctaaggatgatttctggaattcgcggccgcttctagagGGAGgcgcggataaaaatttcatttgcccgc
GACGGATtccccgcccatctatCGTTGAAcccatcagctgcgttcatcagcgaAGctgtcaccggatgtgctttccggtctgatgagtccgtgaggacg
aaacagcctctacaaataattttgtttaaTACTtcacacaggaaagtactagATGAGCAAAGGAGAAGAACTTTTCACTGGAGTTG
TCCCAATTCTTGTTGAATTAGATGGTGATGTTAATGGGCACAAATTTTCTGTCCGTGGAGAGGGTGA
AGGTGATGCTACAAACGGAAAACTCACCCTTAAATTTATTTGCACTACTGGAAAACTACCTGTTCCG
TGGCCAACACTTGTCACTACTCTGACCTATGGTGTTCAATGCTTTTCCCGTTATCCGGATCACATGAA
ACGGCATGACTTTTTCAAGAGTGCCATGCCCGAAGGTTATGTACAGGAACGCACTATATCTTTCAAA
GATGACGGGACCTACAAGACGCGTGCTGAAGTCAAGTTTGAAGGTGATACCCTTGTTAATCGTATCG
AGTTAAAGGGTATTGATTTTAAAGAAGATGGAAACATTCTTGGACACAAACTCGAGTACAACTTTAA
CTCACACAATGTATACATCACGGCAGACAAACAAAAGAATGGAATCAAAGCTAACTTCAAAATTCG
CCACAACGTTGAAGATGGTTCCGTTCAACTAGCAGACCATTATCAACAAAATACTCCAATTGGCGAT
GGCCCTGTCCTTTTACCAGACAACCATTACCTGTCGACACAATCTGTCCTTTCGAAAGATCCCAACG
AAAAGCGTGACCACATGGTCCTTCTTGAGTTTGTAACTGCTGCTGGGATTACACATGGCATGGATGA
GCTCTACAAAggaggtgagaaaaaaatcactggatataccaccgttgatatatcccaatggcatcgtaaagaacattttgaggcatttcagtcagttgctcaat
gtacctataaccagaccgttcagctggatattacggcctttttaaagaccgtaaagaaaaataagcacaagttttatccggcctttattcacattcttgcccgcctgatgaat
gctcatccggaatttcgtatggcaatgaaagacggtgagctggtgatatgggatagtgttcacccttgttacaccgttttccatgagcaaactgaaacgttttcatcgctct
ggagtgaataccacgacgatttccggcagtttctacacatatattcgcaagatgtggcgtgttacggtgaaaacctggcctatttccctaaagggtttattgagaatatgtt
tttcgtctcagccaatccctgggtgagtttcaccagttttgatttaaacgtggccaatatggacaacttcttcgcccccgttttcaccatgggcaaatattatacgcaaggcg
acaaggtgctgatgccgctggcgattcaggttcatcatgccgtttgtgatggcttccatgtcggcagaatgcttaatgaattacaacagtactgcgatgagtggcaggg
cggggcgtaaAATGGCGTTAATAAATAAGGAGGTAAGGTAATATGGCGAGCTATCCGTGTCACCAGCATG
CATCTGCTTTCGATCAGGCAGCGCGCAGCCGTGGTCATTCTAATCGTCGTACCGCACTGCGTCCGCG
TCGTCAGCAGGAGGCCACTGAGGTTCGTCTGGAGCAAAAGATGCCGACCCTGTTACGCGTATACATT
GATGGGCCGCATGGTATGGGTAAAACCACCACGACCCAATTACTGGTTGCGCTGGGCAGCCGTGAT
GATATTGTTTATGTGCCTGAACCGATGACGTATTGGCAGGTGCTGGGCGCGAGTGAAACTATTGCTA
ATATCTATACGACCCAGCATCGTCTGGACCAAGGGGAAATCAGCGCCGGTGATGCAGCCGTAGTGA
TGACCAGTGCGCAAATCACGATGGGTATGCCTTACGCAGTAACCGATGCGGTTCTGGCGCCGCATAT
TGGTGGTGAAGCCGGCAGTAGCCATGCGCCGCCGCCTGCCCTGACCCTGATTTTTGATCGTCACCCG
ATTGCGGCTCTGCTGTGCTATCCTGCTGCACGTTATCTGATGGGTTCTATGACCCCACAGGCCGTCCT
GGCATTCGTTGCACTGATTCCGCCTACTCTGCCTGGGACCAATATCGTGCTGGGGGCGCTGCCAGAA
GATCGTCATATCGACCGTCTGGCGAAACGTCAACGTCCTGGTGAACGCCTGGATCTGGCGATGCTGG
CAGCGATTCGTCGTGTATATGGCCTGCTGGCGAACACTGTCCGTTACCTGCAAGGCGGTGGCAGTTG
GCGTGAAGATTGGGGTCAACTGAGCGGTACGGCAGTTCCTCCGCAGGGTGCGGAACCTCAGTCTAA
CGCAGGTCCGCGTCCGCACATTGGTGATACCCTGTTCACCCTGTTCCGTGCGCCGGAGCTGCTGGCA
CCAAATGGGGATCTGTACAATGTTTTCGCGTGGGCGCTGGATGTTCTGGCTAAGCGTCTGCGCCCGA
TGCATGTTTTTATTCTGGATTATGATCAAAGCCCAGCAGGCTGTCGTGATGCGCTGCTTCAACTGACT
AGCGGCATGGTGCAAACGCATGTGACGACGCCTGGGAGTATCCCGACCATCTGTGATCTTGCCCGTA
CCTTCGCACGTGAAATGGGTGAAGCGAATGCCGAAGCTGCAGCAAAGGAGGCCGCAGCTAAAGCG
GCTGCAGCGAAAGCGGTGTCTAAAGGCGAAGCCGTTATTAAAGAATTCATGCGCTTCAAGGTTCAC
ATGGAGGGCTCGATGAATGGTCATGAGTTCGAGATTGAAGGGGAAGGTGAGGGCCGACCATATGAG
GGCACCCAAACTGCAAAACTGAAGGTTACTAAAGGTGGTCCGCTCCCGTTTAGTTGGGATATTCTGA
GCCCGCAGTTCATGTACGGCTCACGCGCTTTTATTAAGCATCCGGCGGACATACCGGACTACTATAA
ACAGTCCTTCCCGGAAGGGTTTAAATGGGAAAGAGTGATGAACTTTGAGGACGGAGGTGCGGTTAC
AGTGACTCAGGATACCAGTCTGGAGGATGGTACGCTGATCTATAAAGTAAAACTGCGTGGTACCAA
TTTTCCCCCAGATGGCCCCGTAATGCAGAAAAAAACCATGGGGTGGGAAGCATCGACCGAACGCCT
TTACCCGGAAGATGGCGTCTTGAAAGGAGACATCAAAATGGCTTTGCGCTTAAAAGATGGCGGCCG
TTATCTGGCGGATTTTAAAACGACCTACAAAGCCAAGAAACCTGTCCAAATGCCTGGTGCCTACAAC
GTGGATCGTAAACTAGACATCACGTCCCATAACGAAGATTATACAGTGGTCGAACAGTATGAACGG
AGCGAAGGCCGTCACAGCACGGGGGGAATGGACGAATTATATAAGTAACATTACTCGCATCCATTC
TCAGGCTctcggtaccaaattccagaaaagaggcctcccgaaaggggggccttttttcgttttggtccTACTGGCGCGCCTTTACgGCTAG
CTCAGTCCTAGGTAcTATGCTAGCaAGgTAGACTGTCGCCGGATGTGTATCCGACCTGACGATGGCCC
AAAAGGGCCGAAACAGTCCTCTACAAATAATTTTGTTTAATACTtcaTGGACgaaagtactagATGAATGAA
ACCGATCCTGATCTGGAACTGCTGAAACGTATTGGTAATAATGATGCACAGGCCGTTAAAGAAATG
GTTACCCGTAAACTGCCTCGTCTGCTGGCACTGGCAAGTCGCCTGCTGGGTGATGCAGATGAAGCAC
GTGATATTGCACAAGAAAGTTTTCTGCGCATTTGGAAACAGGCAGCAAGCTGGCGTAGCGAACAGG
CACGTTTTGATACCTGGCTGCATCGTGTTGCACTGAATCTGTGTTATGATCGTCTGCGTCGTCGTAAA
GAACATGTGCCGGTTGATAGCGAACATGCCTGTGAAGCATGCCTGAGCTACGAAACCGAAATCCTG
ACCGTTGAATATGGTCTGCTGCCGATCGGCAAAATCGTAGAAAAGCGTATCGAATGTACGGTTTACT
CTGTCGATAACAACGGTAACATCTACACCCAGCCGGTAGCGCAGTGGCACGACCGTGGCGAACAAG
AAGTGTTCGAGTACTGCCTGGAGGATGGCTCTCTGATCCGCGCTACTAAAGACCACAAATTTATGAC
CGTGGACGGTCAAATGCTGCCGATCGATGAAATCTTTGAGCGCGAACTGGACCTGATGCGCGTGGA
CAACCTGCCGAACATCAAAATTGCTACCCGCAAGTATCTGGGTAAGCAGAACGTCTATGACATTGGT
GTGGAGCGCGACCACAATTTCGCTCTGAAAAACGGAGGATCTGGTGGAAGTGGTGGTTCTGGAGGTc
gttttccgaatattaccaacttatgcccgtttggtgaggtgttcaacgcgacccgctttgccagcgtatacgcgtggaatcgtaaacgtatctcgaactgcgtagcggatt
actccgtgctttacaactcagcttccttctccacctttaaatgttatggtgtttcaccgaccaagttaaacgatctgtgctttacgaacgtctatgccgattcatttgtgatcag
aggtgatgaggttcgtcaaattgcgcctggacagacaggcaaaattgcagactataactacaaacttcccgacgattttacgggctgtgttattgcgtggaattcgaaca
acctggatagtaaggttggagggaattataactatctgtaccgcctgtttcgtaaatctaacctgaaacctttcgaacgcgacatatcaactgaaatctatcaggcaggta
gcactccctgtaacggtgtcgagggatttaactgctattttcctctgcagagttatggctttcagcctacgaatggagtaggctatcaaccgtaccgggtggtggttcttag
tttcgagctgctgcatgcaccagccacagtatgtggccccaaaaagtcaacgaatctttaaCTCGGTACCAAATTCCAGAAAAGAGACGC
TTTCGAGCGTCTTTTTTCGTTTTGGTCCcgcttactagtagcggccgctgcagtccggcaaaaaagggcaaggtgtcaccaccctgcccttt
ttctttaaaaccgaaaagattacttcgcgttatgcaggcttcctcgctcactgactcgctgcgctcggtcgttcggctgcggcgagcggtatcagctcactcaaaggcgg
taattcatgaccaaaatcccttaacgtgagttttcgttccactgagcgtcagaccccgtagaaaagatcaaaggatcttcttgagatcctttttttctgcgcgtaatctgctgc
ttgcaaacaaaaaaaccaccgctaccaacggtggtttgtttgccggatcaagagctaccaactctttttccgaaggtaactggcttcagcagagcgcagataccaaata
ctgtccttctagtgtagccgtagttaggccaccacttcaagaactctgtagcaccgcctacatacctcgctctgctaatcctgttaccagtggctgctgccagtggcgata
agtcgtgtcttaccgggttggactcaagacgatagttaccggataaggcgcagcggtcgggctgaacggggggttcgtgcacacagcccagcttggagcgaacga
cctacaccgaactgagatacctacagcgtgagctatgagaaagcgccacgcttcccgaagggagaaaggcggacaggtatccggtaagcggcagggtcggaac
aggagagcgcacgagggagcttccagggggaaacgcctggtatctttatagtcctgtcgggtttcgccacctctgacttgagcgtcgatttttgtgatgctcgtcaggg
gggcggagcctatggaaaaacgccagcaacgcggcctttttacggttcctggccttttgctggccttttgctcacatgttctttcctgcgttatcccctgattctgtggataa
ccgt (SEQ ID NO: 79)

TABLE 8
Protein modifying enzyme and peptide amino acid sequences

| | | SEQ ID |
|---|---|---|
| Name | Sequence | NO |
| EpiA | EAVKEKNDLFNLDVKVNAKESNDSGAEPRIASKFICTPGCAKTGSFNSYCC | 173 |
| EpiD | MHGKLLICATASINVININHYIVELKQHFDEVNILFSPSSKNFINTDVLKLFCDNLYDEIKD | 174 |
| | PLLNHINIVENHEYILVLPASANTINKIANGICDNLLTTVCLTGYQKLFIFPNMNIRMWGNP | |
| | FLQKNIDLLKSNDVKVYSPDMNKSFEISSGRYKNNITMPNIENVLNFVLNNEKRPLD | |
| LasA | MDKRVRYEKPSLVKEGTFRKTTAGLRRLFADQLVGRRNI | 175 |
| LasF | MSIELTPSLADLVDPLPGHALRAAATLRLADLIAAGADTAPALAAAARIDADAIARLMRYLC | 176 |
| | SRGIFQAHEGRYALTEFSELLLDEDPSGLRKTLDQDSYGDRFDRAVAELVDVVRSGEPSYPR | |
| | LYGSTVYDDLAADPALGEVFADVRGLHSAGYGEDVAAVAGWSSCLRVVDLGGGTGSVLLAVL | |
| | ERHPSLSGAVLDLPYVAPQAKKALQASAFAQRCEFIKGSFFDPLPPADRYLLCNVLFNWDDA | |
| | QAGAILARCAQAGPVAGVVVAERLIDPDAEVELVAAQDLRLLAVCGGRQRGTAEFEALGAAH | |
| | GLALTSVTLTASGMSLLRFDVCRAGSAGGEVVEKS | |
| TruE | MNKKNILPQLGQPVIRLTAGQLSSQLAELSEEALGGVDASTLPVPTLCSYDGVDASTVPTLC | 177 |
| | SYDD | |
| TruE* | MNKKNILPQLGQPVIRLTAGQLSSQLAELSEEALGGVDASTVPTLCSYDD | 178 |
| LynD | MQSTPLLQIQPHFHVEVIEPKQVYLLGEQANHALTGQLYCQILPLLNGQYTLEQIVEKLDGE | 179 |
| | VPPEYIDYVLERLAEKGYLTEAAPELSSEVAAFWSELGIAPPVAAEALRQPVTLTPVGNISE | |
| | VTVAALTTALRDIGISVQTPTEAGSPTALNVVLTDDYLQPELAKINKQALESQQTWLLVKPV | |
| | GSVLWLGPVFVPGKTGCWDCLAHRLRGNREVEASVLRQKQAQQQRNGQSGSVIGCLPTARAT | |
| | LPSTLQTGLQFAATEIAKWIVKYHVNATAPGTVFFPTLDGKIITLNHSILDLKSHILIKRSQ | |
| | CPTCGDPKILQHRGFEPLKLESRPKQFTSDGGHRGTTPEQTVQKYQHLISPVTGVVTELVRI | |
| | TDPANPLVHTYRAGHSFGSATSLRGLRNTLKHKSSGKGKTDSQSKASGLCEAVERYSGIFQG | |
| | DEPRKRATLAELGDLAIHPEQCLCFSDGQYANRETLNEQATVAHDWIPQRFDASQAIEWTPV | |
| | WSLTEQTHKYLPTALCYYHYPLPPEHRFARGDSNGNAAGNTLEEAILQGFMELVERDGVALW | |
| | WYNRLRRPAVDLGSFNEPYFVQLQQFYRENDRDLWVLDLTADLGIPAFAGVSNRKTGSSERL | |
| | ILGFGAHLDPTIAILRAVTEVNQIGLELDKVPDENLKSDATDWLITEKLADHPYLLPDTTQP | |
| | LKTAQDYPKRWSDDIYTDVMTCVNIAQQAGLETLVIDQTRPDIGLNVVKVTVPGMRHFWSRF | |
| | GEGRLYDVPVKLGWLDEPLTEAQMNPTPMPF | |
| PaaA | MSLTNVKPLIKESHHIILADDGDICIGEIPGVSQVINDPPSWVRPALAKMDGKRTVPRIFKE | 180 |
| | LVSEGVQIESEHLEGLVAGLAERKLLQDNSFFSKVLSGEEVERYNRQILQFSLIDADNQHPF | |
| | VYQERLKQSKVAIFGMGGWGTWCALQLAMSGIGTLRLIDGDDVELSNINRQVLYRTDDVGKN | |
| | KVDAAKDTILAYNENVHVETFFEFASPDRARLEELVGDSTFIILAWAALGYYRKDTAEEIIH | |
| | SIAKDKAIPVIELGGDPLEISVGPIYLNDGVHSGFDEVKNSVKDKYYDSNSDIRKFQEARLK | |
| | HSFIDGDRKVNAWQSAPSLSIMAGIVTDQVVKTITGYDKPHLVGKKFILSLQDFRSREEEIF | |
| | K | |
| PaaP | MIKFSTLSQRISAITEENAMYTKGQVIVLS | 181 |
| PadeA | MKKQYSKPSLEVLDVHQTMAGPGTSTPDAFQPDPDEDVHYDS | 182 |
| PadeK | MTERAAVRTDHYKAFGFRIESDFVLPELPPAGEREPLDNITVRRTDLQPLWNSSIHFYGNFA | 183 |
| | ILDHGRTVMFRVPGAAIYAVQDASSILVSPFDQAEENWVRLFILGTCIGIILLQRKIMPLHG | |
| | SAVAIDGKAYAIIGESGAGKSTLALHLVSKGYPLLSDDVIPVVMTQGSPWVVPSYPQQKLWV | |
| | DTLKHMGMDNANYTPLYERKTKFAVPVGSNFHEEPLPLASIFELVPWDAATHIAPIQGMERF | |
| | RVLFHHTYRNFLVQPLGLMEWHFKTLSSFVHQIGMYRLHRPMVGFSTLDLTSHILNITRQGE | |
| | NDQ | |
| PalA | MKDLLKELMYEVDLEEMENLQGSGYSAAQCAWMALSCVNYIPGVGFGCGGYSACELYKRYC | 184 |
| PalS | MGNLRDFYQLMKDNYADSNLFKDLNLIHNISNDIQIGINCDFSEMLGELVGNYDSLNYPSIT | 185 |
| | CGILTYNEERCIKRCLESVVNEFDEIIVLDSVSEDNTVKIIKENFNDVKVYVEPWKNDFSFH | |
| | RNKIINLATCDWIYFIDADNYYDSKNKGKAMRIAKVMDFLKIEGVVSPTVIEHDNSMSRDTR | |
| | KMFRLKDNILFSGKVHEEPVYANGEIPRNIIVDINVFHDGYNPKIINMMEKNERNITLTKEM | |
| | MKIEPNNPKWLYFYSRELYQTQRDIALVQSVLFKALELYENSSYTRYYVDTIALLCRVLFES | |
| | KNYQKLTECLNILENNTLNCSDIDYYNSALLFYNLLLRIKKISSTLKENIDMYERDYHSFIN | |
| | PSHDHIKILILNMLLLLGDYQDAFKVYKEIKSIEIKDEFLVNVNKFKDNLLSFIDSINKI | |
| PlpA2 | MSIESAKAFYQRMTDDASFRTPFEAELSKEERQQLIKDSGYDFTAEEWQQAMTEIQAARSNE | 186 |
| | ELNEEELEAIAGGAVAAMYGVVFPWDNEFPWPRWGG | |
| PlpX | MTKKYRRVSYAVWEITLKCNLACSHCGSRAGQARTKELSTEEAFNLVRQLADVGIKEVTLIG | 187 |
| | GEAFMRSDWLEIAKAVTEAGMICGMTTGGFGVSLETARKMKEAGIKTVSVSIDGGIPETHDR | |
| | QRGKKGAWHSAFRTMSHLKEVGIYFGCNTQINRLSASEFPIIYERIRDAGARAWQIQLTVPM | |
| | GNAADNADMLLQPYELLDIYPMLARVAKRAKQEGVRIQAGNNIGYYGPYERLLRGSDEWTFW | |
| | QGCGAGLNTLGIEADGKIKGCPSLPTAAYTGGNIRDRPLREIVEQTEELKFNLKAGTEQGTD | |
| | HMWGFCKTCEFAELCRGGCSWTAHVFFDRRGNNPYCHHRALKQAQKDIRERFYLKVKAKGNP | |
| | FDNGEFVIIEEPFNAPLPENDLLHFNSDHIQWPENWQNSESAYALAK | |
| PlpY | MNSNQIPNKVATAAQKSDDSSSVLPRQGWQDKQAFIKALIKAKQSLEIAEISNFLT | 188 |
| TgnA* | MYRPYIAKYVEEQTLQNSTNLVYDDITQISFINKEKNVKKINLGPDTTIVTETIENADPDEY | 189 |
| | FL | |
| TgnB | MKTILIITNTLDLTVDYIINRYNHTAKFFRLNTDRFFDYDINITNSGTSIRNRKSNLIINIQ | 190 |
| | EIHSLYYRKITLPNLDGYESKYWTLMQREMMSIVEGIAETAGNFALTRPSVLRKADNKIVQM | |
| | KLAEEIGFILPQSLITNSNQAAASFCNKNNTSIVKPLSTGRILGKNKIGIIQTNLVETHENI | |
| | QGLELSPAYFQDYIPKDTEIRLTIVGNKLFGANIKSTNQVDWRKNDALLEYKPANIPDKIAK | |
| | MCLEMMEKLEINFAAFDFIIRNGDYIFLELNANGQWLWLEDILKFDISNTIINYLLGEPI | |
| ThcoA | MRKKEWQTPELEVLDVRLTAAGPGKAKPDAVQPDEDEIVHYS | 191 |
| ThcoK | MTRTNTGYRYRAFGLRIDSDIPLPELGDGTRPDGDADLTVVRCGEAEPEWAEGGGGGRLYAA | 192 |
| | EGIVSFRVPQTAAFRITNGNRIEVHAYSGADEDRIRLYVLGTCMGALLLQRRILPLHGSVVA | |
| | RDGRAYAIVGESGAGKSTMSAALLERGFRLVTDDVAAIVFDERGTPLVMPAYPQQKLWQDSL | |
| | DRLQIAGSGLRPLFERETKYAVPADGAFWPEPVPLVHIYELVHSDGQTPELQPIAKLERCYT | |
| | LYRHTFRRSLIVPSGLSAWHFETAVKLAEKTGMYRLMRPAKVFAARESARLIETHADGEVSR | |

*TruE and TgnA peptides used in this study were truncated relative to the wild-type peptides.

TABLE 9
Genetic parts

| | | |
|---|---|---|
| | | SEQ |
| Name | Sequence | ID NO |

Promoters

| | | |
|---|---|---|
| P_{CymRC} | AACAAACAGACAATCTGGTCTGTTTGTATTATGGAAAATTTTTCTGTATAATAGAT | 193 |
| | TCAACAAACAGACAATCTGGTCTGTTTGTATTAT | |
| P_{LacI} | GCGGCGCGCCATCGAATGGCGCAAAACCTTTCGCGGTATGGCATGATAGCGCCC | 194 |
| P_{LacIQ} | GCGGCGCGCCATCGAATGGTGCAAAACCTTTCGCGGTATGGCATGATAGCGCCC | 195 |
| PT5_{LacO} | AATCATAAAAAATTTATTTGCTTTGTGAGCGGATAACAATTATAATAGATTCAATT | 196 |
| | GTGAGCGGATAACAATT | |

Ribosome Binding Sites

| | | |
|---|---|---|
| RBS_{EpiD} | ACTGAACTATAAGGTAGGTATATT | 197 |
| RBS_{LacI} | GGAAGAGAGTCAATTCAGGGTGGTGAAT | 198 |
| RBS_{LasF} | AGAGCCATCAGATTTAAGGAACATAAAAA | 199 |
| RBS_{LynD} | CTAAATTCCCCCGAGGTCAATA | 200 |
| RBS_{PaaA} | AGATCATTTCCAATAAGGGGGACACT | 201 |
| RBS_{PadeK} | AGACACCGAAACCTAAGGAGGGATAT | 202 |
| RBS_{PalS} | AGACCAAACAATTAGGAGGACAAAT | 203 |
| RBS_{peptide} | ACCCAACACCACCAGCAAGCCTAAGGAGGAGAAAT | 204 |
| RBS_{Plp}x^{a} | AGAGCCACCATTTATAAGGAGAACCTACCG | 205 |
| RBS_{Plp}Y^{a} | ATATAAAGTTAAGGAGTTGCAC | 206 |
| RBS_{TgnB} | AGAAATATTACAACGAGGTAAAGGC | 207 |
| RBS_{TheoK} | AGAGCATTCCATAAGGAGAAATTTT | 208 |

Terminators

| | | |
|---|---|---|
| B0062 | CAGATAAAAAAAATCCTTAGCTTTCGCTAAGGATGATTTCT | 209 |
| ECK120029600 | TTCAGCCAAAAAACTTAAGACCGCCGGTCTTGTCCACTACCTTGCAGTAATGCGGT | 210 |
| | GGACAGGATCGGCGGTTTTCTTTTCTCTTCTCAA | |
| AraC Terminator | TTGGTAACGAATCAGACAATTGACGGCTCGAGGGAGTAGCATAGGGTTTGCAGAAT | 211 |
| w/ 2 SNPs | CCCTGCTTCGTCCATTTGACAGGCACATTATGCATCGATGATAAGCTGTCAAACAT | |
| | GAGCA | |
| His operon | TCCGGCAAAAAAGGGCAAGGTGTCACCACCCTGCCCTTTTTCTTTAAAACCGAAAA | 212 |
| terminator | GA | |
| L3S3P21 | CCAATTATTGAAGGCCTCCCTAACGGGGGGCCTTTTTTTGTTTCTGGTCTCCC | 213 |
| L3S3P41^{b} | AAAAAAAAAAAACACCCTAACGGGTGTTTTTTTTTTTTTGGTGTCCC | 214 |
| IOT | TTGGTAACGAATCAGACAATTGACGGCTCGAGGGAGTAGCATAGGGTTTGCAGAAT | 215 |
| | CCCTGCTTCGTCCATTTGACAGGCACATTATGCATCGATGATAAGCTGTCAAACAT | |
| | GAGCAGATCCTCTACGCCGGACGCATCGTGGCCGGCATCACCGGCGCCACAGGTGC | |
| | GGTTGCTGGCGCCTATATCGCCGACATCACCGATGGGGAAGATCGGGCTCGCCACT | |
| | TCGGGCTCATGAGCAAATATTTTATCTG | |

Ribozymes

| | | |
|---|---|---|
| RiboJ53 | AGCGGTCAACGCATGTGCTTTGCGTTCTGATGAGACAGTGATGTCGAAACCGCCTC | 216 |
| | TACAAATAATTTTGTTTAA | |

Linkers/Tags

| | | |
|---|---|---|
| N-terminal sumo | ATGTCATATTACCACCATCACCATCATCACGGGTCCCTGCAG | 217 |
| affinity tag | | |
| (ATag-2) | | |
| N-terminal sumo | CATCACCATCACCACCATGGATATGATATTAGCACAGGT | 218 |
| linker v1 (Link- | | |
| 1) | | |
| N-terminal sumo | TGCATGTCATATTACGACTCCATTCCCACAAGCGAGAACTTGTACTTTCAAGGGTG | 219 |
| linker v2 (Link- | C | |
| 2) | | |

Genes Miscellaneous

| | | |
|---|---|---|
| Small Ubiquitin- | GACTCAGAAGTCAATCAAGAAGCTAAGCCAGAGGTCAAGCCAGAAGTCAAGCCTGA | 220 |
| like Modifier | GACTCACATCAATTTAAAGGTGTCCGATGGATCTTCAGAGATCTTCTTCAAGATCA | |
| (SUMO) | AAAAGACCACTCCTTTAAGAAGGCTGATGGAAGCGTTCGCTAAAAGACAGGGTAAG | |
| | GAAATGGACTCCTTAAGATTCTTGTACGACGGTATTAGAATTCAAGCTGATCAGGC | |
| | CCCTGAAGATTTGGACATGGAGGATAACGATATTATTGAGGCTCACCGCGAACAGA | |
| | TTGGAGGT | |
| lacI | ATGAAACCAGTAACGTTATACGATGTCGCAGAGTATGCCGGTGTCTCTTATCAGAC | 221 |
| | CGTTTCCCGCGTGGTGAACCAGGCCAGCCACGTTTCTGCGAAAACGCGGGAAAAAG | |
| | TGGAAGCGGCGATGGCGGAGCTGAATTACATTCCCAACCGCGTGGCACAACAACTG | |
| | GCGGGCAAACAGTCGTTGCTTATTGGCGTTGCCACCTCCAGTCTGGCCCTGCACGC | |
| | GCCGTCGCAAATTGTCGCGGCGATTAAATCTCGCGCCGATCAACTGGGTGCCAGCG | |
| | TGGTGGTGTCGATGGTAGAACGAAGCGGCGTCGAAGCCTGTAAAGCGGCGGTGCAC | |
| | AATCTTCTCGCGCAACGCGTCAGTGGGCTGATCATTAACTATCCGCTGGATGACCA | |
| | GGATGCCATTGCTGTGGAAGCTGCCTGCACTAATGTTCCGGCGTTATTTCTTGATG | |
| | TCTCTGACCAGACACCCATCAACAGTATTATTTTCTCCCATGAGGACGGTACGCGA | |
| | CTGGGCGTGGAGCATCTGGTCGCATTGGGTCACCAGCAAATCGCGCTGTTAGCGGG | |
| | CCCATTAAGTTCTGTCTCGGCGCGTCTGCGTCTGGCTGGCTGGCATAAATATCTCA | |
| | CTCGCAATCAAATTCAGCCGATAGCGGAACGGGAAGGCGACTGGAGTGCCATGTCC | |
| | GGTTTTCAACAAACCATGCAAATGCTGAATGAGGGCATCGTTCCCACTGCGATGCT | |
| | GGTTGCCAACGATCAGATGGCGCTGGGCGCAATGCGCGCCATTACCGAGTCCGGGC | |
| | TGCGCGTTGGTGCGGATATCTCGGTAGTGGGATACGACGATACCGAAGATAGCTCA | |
| | TGTTATATCCCGCCGTTAACCACCATCAAACAGGATTTTCGCCTGCTGGGGCAAAC | |
| | CAGCGTGGACCGCTTGCTGCAACTCTCTCAGGGCCAGGCGGTGAAGGGCAATCAGC | |
| | TGTTGCCAGTCTCACTGGTGAAAAGAAAAACCACCCTGGCGCCCAATACGCAAACC | |
| | GCCTCTCCCCGCGCGTTGGCCGATTCATTAATGCAGCTGGCACGACAGGTTTCCCG | |
| | ACTGGAAAGCGGGCAGTGATAA | |
| cymR | ATGAGCCCGAAACGTCGTACCCAGGCAGAACGTGCAATGGAAACCCAGGGTAAACT | 222 |
| | GATTGCAGCAGCACTGGGTGTTCTGCGTGAAAAAGGTTATGCAGGTTTTCGTATTG | |
| | CAGATGTTCCGGGTGCAGCCGGTGTTAGCCGTGGTGCACAGAGCCATCATTTTCCG | |
| | ACCAAACTGGAACTGCTGCTGGCAACCTTTGAATGGCTGTATGAGCAGATTACCGA | |
| | ACGTAGCCGTGCACGTCTGGCAAAACTGAAACCGGAAGATGATGTTATTCAGCAGA | |
| | TGCTGGATGATGCAGCAGATTTTTTTCTGGATGATGATTTTAGCATCGGCCTGGAT | |
| | CTGATTGTTGCAGCAGATCGTGATCCGGCACTGCGTGAAGGTATTCTGCGTACCGT | |
| | TGAACGTAATCGTTTTGTTGTTGAAGATATGTGGCTGGGTGTGCTGGTGAGCCGTG | |
| | GTCTGAGCCGTGATGATGCCGAAGATATTCTGTGGCTGATTTTTAACAGCGTTCGT | |
| | GGTCTGACAGTTCGTAGCCTGTGGCAGAAAGATAAAGAACGTTTTGAACGTGTGCG | |
| | TAATAGCACCCTGGAAATTGCACGTGAACGTTATGCAAAATTCAAACGTTGATAA | |

Modifying Enzymes

| | | |
|---|---|---|
| epiD | ATGCACGGTAAACTGCTGATCTGCGCAACTGCTTCGATCAACGTCATCAATATCAA | 223 |
| | CCATTATATTGTGGAGCTGAAACAGCACTTCGATGAGGTGAATATCCTGTTTTCAC | |
| | CTTCCTCGAAGAACTTTATCAACACCGATGTCCTGAAGCTGTTTTGCGATAATCTG | |
| | TATGACGAGATCAAAGATCCGCTGCTGAACCACATCAACATAGTGGAGAACCACGA | |
| | GTATATCTTGGTGCTGCCTGCCAGTGCCAATACGATCAACAAAATCGCGAACGGTA | |
| | TATGCGATAACCTCTTGACGACCGTATGCTTAACCGGGTACCAGAAACTGTTTATC | |
| | TTTCCGAATATGAACATCCGCATGTGGGGAAATCCGTTCTTACAGAAAAATATTGA | |
| | CCTGCTTAAAAGCAACGACGTGAAGGTGTATTCCCCCGACATGAACAAATCTTTTG | |
| | AGATAAGCTCAGGCCGCTACAAAAATAACATCACGATGCCGAATATCGAAAACGTG | |
| | CTGAATTTTGTCCTGAACAATGAGAAACGCCCGCTGGATTAATAA | |
| lasF | ATGTCTATCGAACTGACGCCTAGTTTGGCCGATCTGGTCGATCCACTTCCAGGTCA | 224 |
| | CGCACTGCGCGCTGCGGCGACATTACGTCTGGCAGATCTGATTGCGGCTGGTGCAG | |
| | ATACTGCACCGGCATTAGCAGCGGCGGCACGCATTGATGCTGACGCGATCGCGCGT | |
| | CTTATGCGGTATCTGTGCAGTCGCGGGATTTTTCAAGCACATGAAGGCCGGTACGC | |
| | GTTGACTGAATTTAGCGAATTGCTGCTGGATGAAGATCCATCTGGCCTGCGTAAAA | |
| | CCTTAGATCAGGATAGCTATGGGGATCGTTTCGACCGCGCGGTTGCGGAACTGGTG | |
| | GACGTTGTACGGTCCGGTGAACCTTCTTATCCTCGCCTTTACGGCTCGACGGTTTA | |
| | TGATGACCTGGCAGCCGATCCTGCCCTCGGCGAGGTGTTCGCGGATGTTCGTGGCT | |
| | TGCACTCCGCAGGGTATGGGGAAGATGTCGCGGCAGTGGCGGGTTGGTCCTCATGC | |
| | CTGCGCGTTGTCGATCTGGGTGGAGGGACTGGCTCCGTCCTGCTTGCTGTGTTAGA | |
| | GCGTCACCCGTCCCTGTCAGGCGCAGTACTGGATCTGCCATACGTCGCCCCGCAGG | |
| | CAAAGAAAGCTCTGCAGGCCTCAGCGTTTGCCCAACGTTGTGAATTTATCAAAGGG | |
| | AGCTTCTTCGATCCGTTACCTCCGGCAGACCGTTACCTGTTGTGTAACGTGCTGTT | |
| | CAACTGGGATGACGCGCAAGCAGGCGCTATTTTGGCACGCTGTGCGCAGGCGGGCC | |
| | CTGTGGCCGGAGTAGTGGTAGCCGAACGTTTGATCGATCCGGATGCGGAAGTGGAA | |
| | CTCGTAGCAGCTCAAGATCTGCGTCTGTTGGCTGTTTGCGGCGGTCGGCAGCGTGG | |
| | CACCGCTGAATTCGAAGCGCTTGGGGCAGCCCATGGCCTGGCGTTAACCAGCGTTA | |
| | CCCTCACGGCATCTGGTATGAGCCTGCTCCGTTTCGATGTGTGTCGTGCCGGGAGT | |
| | GCTGGCGGGGAAGTTGTGGAAAAATCTTAATAA | |
| lynD | ATGCAATCTACACCATTACTGCAAATACAACCACATTTCCATGTAGAGGTCATTGA | 225 |
| | ACCAAAGCAAGTCTACTTGTTGGGTGAACAAGCTAATCATGCATTGACAGGCCAAT | |
| | TATACTGCCAAATTTTGCCATTGTTAAACGGACAATACACATTGGAACAAATCGTT | |
| | GAAAAACTAGACGGAGAAGTACCACCTGAATACATTGATTATGTGCTGGAGAGACT | |
| | AGCTGAGAAGGGCTATCTGACTGAAGCAGCACCTGAATTATCTAGTGAAGTGGCCG | |
| | CTTTCTGGTCTGAGCTGGGGATTGCACCTCCTGTCGCGGCCGAAGCATTACGTCAA | |
| | CCTGTGACTTTAACACCTGTTGGAAACATCAGCGAAGTAACAGTAGCAGCCTTAAC | |
| | CACAGCCCTACGTGATATCGGTATTTCCGTTCAAACACCTACAGAAGCTGGATCGC | |
| | CAACTGCATTGAACGTTGTACTTACCGATGATTATCTCCAACCAGAACTCGCTAAG | |
| | ATCAATAAGCAAGCCTTAGAAAGTCAACAAACTTGGCTACTTGTCAAACCAGTTGG | |
| | CTCCGTGTTATGGTTGGGTCCGGTATTCGTGCCAGGAAAAACAGGTTGCTGGGATT | |
| | GTTTGGCTCACAGATTAAGGGGGAATAGAGAGGTAGAGGCCTCTGTATTGAGACAA | |
| | AAACAAGCTCAACAACAACGTAATGGACAAAGCGGGTCTGTAATAGGATGCCTTCC | |
| | CACGGCTAGAGCGACACTGCCCTCAACACTCCAAACTGGGCTGCAGTTCGCTGCTA | |
| | CCGAAATTGCTAAATGGATAGTTAAGTATCATGTTAATGCCACAGCGCCTGGCACC | |
| | GTATTCTTCCCTACATTGGATGGTAAGATAATTACGCTAAATCACTCCATACTGGA | |
| | TTTGAAGTCACATATTCTGATCAAGCGTTCTCAATGTCCCACCTGTGGTGACCCAA | |
| | AAATCTTACAGCACCGTGGTTTCGAACCTTTAAAACTTGAGTCAAGGCCTAAACAG | |
| | TTCACCTCAGACGGCGGACATCGTGGTACTACCCCTGAACAAACTGTCCAGAAATA | |
| | TCAACATTTAATCTCGCCTGTTACCGGTGTAGTTACTGAATTGGTCAGGATAACTG | |
| | ATCCGGCCAATCCACTAGTTCACACATATAGAGCTGGTCATAGCTTCGGGAGCGCT | |
| | ACATCGCTGAGAGGGCTGCGTAATACCTTAAAGCATAAGAGTTCAGGTAAGGGTAA | |
| | GACTGATTCTCAAAGTAAAGCCTCGGGCCTGTGTGAGGCGGTAGAACGTTACTCAG | |
| | GAATCTTTCAAGGTGACGAACCGAGAAAACGCGCCACATTGGCTGAATTGGGAGAT | |
| | TTGGCAATTCACCCTGAGCAATGCTTGTGTTTTTCCGACGGTCAGTACGCTAATAG | |
| | AGAAACTTTAAACGAACAGGCAACGGTGGCACATGATTGGATACCTCAACGTTTTG | |
| | ATGCATCACAAGCTATTGAATGGACTCCAGTCTGGTCCCTAACTGAACAGACCCAT | |
| | AAATATTTGCCCACCGCATTGTGTTACTACCATTATCCTCTACCCCCAGAACACAG | |
| | ATTCGCACGTGGAGATTCGAATGGTAATGCTGCCGGAAATACGTTGGAAGAGGCTA | |
| | TACTCCAAGGCTTCATGGAATTAGTCGAGAGAGATGGTGTGGCTTTATGGTGGTAT | |
| | AACAGGCTACGCAGACCCGCTGTAGACTTAGGCTCATTTAACGAGCCATACTTCGT | |
| | TCAGTTGCAACAATTCTACAGAGAAAACGATAGAGATTTGTGGGTTTTGGACTTGA | |
| | CAGCTGATTTAGGTATCCCGGCTTTCGCGGGCGTTTCTAATAGAAAAACTGGTAGT | |
| | TCGGAGAGGTTGATATTAGGATTCGGTGCACACCTCGATCCTACTATTGCAATTCT | |
| | GAGAGCAGTTACAGAAGTTAACCAGATTGGCCTTGAATTAGATAAAGTTCCAGACG | |
| | AGAACCTTAAGAGCGACGCAACAGATTGGCTAATTACTGAAAAATTAGCTGACCAC | |
| | CCTTATTTGTTACCAGATACAACTCAACCTCTAAAAACTGCTCAAGATTATCCTAA | |
| | AAGGTGGTCTGACGATATATACACGGACGTAATGACTTGCGTTAATATTGCTCAAC | |
| | AAGCAGGACTTGAAACTCTAGTTATTGATCAAACACGTCCGGACATTGGTTTGAAT | |
| | GTTGTTAAGGTGACAGTCCCGGGGATGAGGCACTTTTGGTCAAGATTTGGAGAGGG | |
| | GAGGCTTTATGACGTGCCCGTCAAATTAGGTTGGCTTGACGAACCTTTGACCGAAG | |
| | CGCAAATGAACCCCACGCCGATGCCTTTTTAATAA | |
| paaA | ATGAGCCTGACGAATGTCAAGCCGTTGATTAAAGAATCCCACCACATCATTTTAGC | 226 |
| | TGACGATGGTGACATTTGCATTGGGGAAATTCCGGGGGTGTCTCAGGTAATCAATG | |
| | ACCCGCCGTCGTGGGTTCGTCCTGCCCTGGCAAAGATGGATGGCAAGCGTACTGTC | |
| | CCCCGTATTTTCAAAGAACTGGTCAGTGAAGGCGTACAGATCGAATCCGAACATCT | |
| | GGAAGGCCTGGTAGCCGGGCTTGCCGAACGCAAACTTCTCCAGGATAACAGTTTCT | |
| | TTTCCAAGGTGTTAAGCGGTGAAGAAGTGGAGCGCTATAACCGCCAGATTCTGCAG | |
| | TTCAGCCTTATCGATGCGGATAACCAGCACCCTTTCGTTTACCAAGAGCGGCTGAA | |
| | ACAGTCTAAAGTCGCTATCTTCGGTATGGGTGGCTGGGGCACGTGGTGTGCATTGC | |
| | AGCTGGCCATGTCAGGCATTGGTACACTGCGGCTGATCGACGGCGATGATGTGGAA | |
| | CTGTCGAACATTAACCGCCAAGTTCTGTATCGCACGGATGATGTAGGTAAAAACAA | |
| | AGTTGATGCCGCCAAAGACACTATCCTGGCATACAACGAAAACGTGCATGTTGAAA | |
| | CCTTCTTTGAATTCGCCAGCCCGGACCGTGCCCGGCTTGAAGAACTTGTGGGTGAT | |
| | TCTACCTTTATTATCCTGGCTTGGGCCGCGTTGGGTTACTACCGTAAAGATACGGC | |
| | AGAGGAAATTATCCATTCGATTGCGAAAGATAAAGCGATCCCTGTAATTGAACTCG | |
| | GCGGTGATCCTTTGGAAATCTCTGTCGGTCCTATTTACCTGAATGATGGCGTACAC | |
| | AGCGGCTTCGACGAGGTGAAAAATTCCGTTAAAGATAAATACTACGACAGCAACAG | |
| | CGATATCCGCAAATTTCAAGAGGCGCGGTTGAAACACAGCTTCATCGATGGCGATC | |
| | GTAAAGTGAACGCGTGGCAATCAGCGCCCAGCCTGAGTATTATGGCTGGTATCGTA | |
| | ACGGATCAGGTTGTGAAAACCATTACCGGGTACGACAAGCCACATCTCGTTGGCAA | |
| | GAAATTTATCTTGAGTCTGCAAGATTTCCGCAGCCGCGAGGAGGAGATCTTTAAAT | |
| | AATAA | |
| padeK | ATGACCGAACGTGCCGCAGTGCGTACCGACCATTATAAAGCCTTTGGGTTTAGAAT | 227 |
| | TGAAAGCGATTTCGTGCTCCCGGAACTTCCGCCCGCAGGCGAACGCGAACCGCTCG | |
| | ATAATATTACGGTTCGTCGTACCGACCTGCAGCCGCTCTGGAATTCTAGTATCCAT | |
| | TTTTACGGAAACTTTGCCATTCTGGATCACGGACGCACGGTTATGTTTCGAGTTCC | |
| | GGGTGCTGCTATCTATGCGGTACAGGATGCTAGCAGCATATTAGTGTCCCCATTCG | |
| | ATCAGGCAGAAGAAAACTGGGTACGTCTTTTTATTCTGGGTACCTGTATTGGGATC | |
| | ATCCTGCTGCAGCGTAAGATTATGCCGCTGCACGGTAGCGCCGTTGCCATTGATGG | |
| | CAAAGCCTACGCGATTATCGGCGAATCTGGTGCCGGCAAAAGCACTCTTGCACTGC | |
| | ATCTTGTCAGTAAGGGTTATCCATTGCTTTCGGATGATGTGATTCCGGTCGTTATG | |
| | ACCCAGGGCTCCCCCTGGGTGGTGCCGTCGTACCCGCAACAAAAACTTTGGGTGGA | |
| | CACTCTGAAGCACATGGGAATGGATAATGCAAACTATACGCCGCTGTACGAACGTA | |
| | AAACGAAGTTCGCGGTGCCCGTGGGCAGTAATTTCCACGAAGAACCGCTGCCGTTA | |
| | GCTAGCATTTTCGAGCTTGTCCCGTGGGATGCGGCAACGCACATTGCCCCGATCCA | |
| | AGGGATGGAACGCTTTCGTGTCCTGTTCCACCACACTTATCGGAACTTTCTGGTTC | |
| | AGCCGCTGGGTCTTATGGAATGGCATTTTAAAACTCTGAGCTCGTTCGTTCACCAA | |
| | ATTGGAATGTATCGTCTGCATAGACCTATGGTCGGATTCAGTACCTTAGATTTAAC | |
| | GTCGCACATTCTGAATATAACGCGTCAGGGAGAGAACGATCAATAATAA | |
| palS | ATGGGGAATTTGCGTGATTTCTACCAACTGATGAAAGATAACTATGCGGACTCTAA | 228 |
| | TCTGTTCAAGGATTTGAATCTGATCCACAATATCTCCAACGACATCCAAATTGGAA | |
| | TTAATTGCGATTTCTCTGAAATGCTGGGAGAACTGGTAGGTAATTACGATTCCCTG | |
| | AACTATCCGTCAATCACCTGTGGTATTCTGACGTATAATGAAGAACGCTGCATTAA | |
| | ACGTTGTCTGGAAAGTGTGGTGAACGAATTCGATGAGATTATTGTCTTGGATAGTG | |
| | TATCCGAGGACAATACCGTGAAAATTATCAAGGAGAATTTCAACGATGTCAAAGTC | |
| | TACGTCGAGCCATGGAAGAACGATTTTTCATTTCACCGCAACAAGATCATTAATCT | |
| | CGCAACGTGCGACTGGATCTACTTTATCGACGCGGATAATTATTATGATTCGAAGA | |
| | ACAAGGGTAAAGCCATGCGCATCGCTAAGGTTATGGATTTCTTGAAAATCGAAGGC | |
| | GTTGTGAGCCCAACGGTCATTGAGCATGACAATAGCATGAGCCGTGATACCCGTAA | |
| | GATGTTTCGTCTGAAAGATAACATTCTGTTTAGCGGTAAAGTTCATGAAGAACCGG | |
| | TGTATGCCAATGGTGAGATCCCCCGGAACATCATAGTAGACATCAACGTGTTTCAC | |
| | GACGGCTATAACCCAAAGATTATCAACATGATGGAAAAGAACGAGCGCAATATCAC | |
| | CCTGACTAAAGAGATGATGAAGATCGAACCGAACAATCCGAAATGGCTGTACTTCT | |
| | ATAGCCGCGAACTCTATCAGACGCAACGTGACATTGCCCTTGTGCAAAGTGTACTG | |
| | TTCAAGGCACTGGAACTGTATGAAAACAGTTCATATACGCGTTATTATGTTGACAC | |
| | CATTGCCTTACTGTGCCGAGTGCTGTTCGAATCTAAAAACTACCAGAAACTTACGG | |
| | AATGTCTGAACATCCTGGAGAACAATACGCTTAACTGTTCCGATATCGATTACTAT | |
| | AATTCAGCGCTGCTGTTCTACAACCTGTTACTGCGCATCAAGAAAATTAGCTCCAC | |
| | CCTGAAGGAGAACATTGATATGTACGAACGTGACTATCATAGCTTTATCAACCCCT | |
| | CGCATGATCACATTAAGATTCTGATATTAAATATGCTCCTGCTGCTCGGCGATTAC | |
| | CAGGATGCCTTTAAGGTTTACAAGGAGATCAAGTCCATTGAGATTAAAGATGAGTT | |
| | TCTGGTGAACGTGAACAAATTCAAAGACAATCTTCTGAGCTTCATTGACTCCATTA | |
| | ACAAAATTTAATAA | |
| plpX^{a} (Expressed | ATGACCAAAAAGTATCGGCGTGTATCCTACGCAGTGTGGGAAATCACCCTGAAATG | 229 |
| as plpXY) | CAATCTGGCATGCTCTCATTGTGGCAGCCGCGCCGGCCAAGCCCGTACGAAAGAGC | |
| | TGAGTACCGAAGAAGCGTTCAACCTGGTCCGCCAGCTGGCCGACGTGGGCATTAAG | |
| | GAAGTCACCCTGATCGGTGGTGAAGCCTTTATGCGTTCGGATTGGCTGGAAATCGC | |
| | GAAAGCCGTCACTGAAGCCGGCATGATCTGTGGCATGACCACAGGGGGCTTCGGGG | |
| | TCAGTCTGGAAACGGCGCGTAAAATGAAAGAAGCGGGCATTAAAACGGTGAGCGTT | |
| | AGCATTGACGGTGGTATTCCTGAAACCCACGACCGCCAGCGCGGTAAAAAGGGTGC | |
| | GTGGCATAGTGCATTCCGGACTATGAGCCATCTGAAAGAAGTCGGGATCTACTTCG | |
| | GTTGCAACACTCAAATCAATCGTTTATCGGCGTCAGAATTCCCGATTATCTATGAA | |
| | CGTATTCGCGATGCTGGGGCACGTGCGTGGCAAATTCAGCTGACGGTTCCGATGGG | |
| | CAACGCCGCGGATAACGCAGATATGCTGCTGCAACCGTATGAATTGCTCGACATCT | |
| | ATCCGATGTTAGCCCGCGTTGCCAAACGTGCGAAACAGGAAGGCGTGCGTATTCAG | |
| | GCAGGTAACAACATCGGGTACTATGGACCGTATGAGCGTCTGCTGCGTGGCAGCGA | |
| | CGAATGGACGTTTTGGCAAGGATGTGGTGCGGGCCTTAACACCCTCGGCATCGAAG | |
| | CCGACGGCAAAATCAAAGGCTGTCCATCCCTGCCGACCGCCGCGTACACCGGCGGT | |
| | AACATTCGCGATCGCCCGCTGCGGGAAATCGTCGAACAGACCGAAGAACTGAAATT | |
| | TAACTTAAAAGCTGGTACAGAACAAGGTACGGACCATATGTGGGGCTTTTGTAAAA | |
| | CCTGCGAATTCGCGGAACTCTGTCGCGGCGGATGCAGCTGGACTGCGCATGTGTTC | |
| | TTTGACCGGCGCGGCAATAATCCGTACTGCCACCATCGGGCTCTGAAACAAGCCCA | |
| | AAAAGACATTCGCGAACGCTTTTATTTAAAAGTGAAAGCAAAGGGCAACCCGTTCG | |
| | ACAATGGTGAATTTGTTATCATTGAAGAACCTTTTAACGCTCCGTTACCCGAGAAT | |
| | GACCTGCTGCACTTTAACAGTGATCACATTCAATGGCCAGAAAACTGGCAAAATAG | |
| | TGAAAGCGCGTACGCATTGGCCAAGTAATAA | |
| plpY^{a} (Expressed | ATGAACAGTAATCAGATCCCTAACAAAGTTGCAACCGCGGCACAGAAATCTGACGA | 230 |
| as plpXY) | CAGCAGCAGCGTATTACCGCGCCAGGGGTGGCAAGACAAACAAGCCTTTATTAAGG | |
| | CACTCATTAAAGCCAAACAGTCTCTCGAAATTGCCGAAATTAGCAACTTTTTAACC | |
| tgnB | ATGAAAACCATTCTGATTATTACCAATACCCTGGATCTGACCGTGGATTATATTAT | 231 |
| | TAATCGCTATAATCATACCGCTAAATTTTTTCGTCTGAATACCGATCGTTTTTTTG | |
| | ATTATGATATTAATATTACCAATAGCGGTACCAGCATTCGTAATCGTAAATCTAAT | |
| | CTGATTATTAATATTCAGGAAATTCATAGCCTGTATTATCGCAAAATTACCCTGCC | |
| | GAATCTGGATGGCTATGAAAGTAAATATTGGACCCTGATGCAGCGCGAAATGATGA | |
| | GTATTGTTGAAGGCATTGCAGAAACCGCTGGCAATTTTGCACTGACCCGTCCGTCT | |
| | GTGCTGCGCAAAGCTGATAATAAAATTGTGCAGATGAAACTGGCAGAAGAAATTGG | |
| | TTTTATTCTGCCGCAGAGTCTGATTACCAATTCAAATCAGGCGGCAGCCTCATTTT | |
| | GCAATAAAAATAATACCAGCATTGTGAAACCGCTGAGTACCGGCCGCATTCTGGGT | |
| | AAAAATAAAATTGGCATTATTCAGACCAATCTGGTTGAAACCCATGAAAATATTCA | |
| | GGGCCTGGAACTGTCTCCGGCTTATTTTCAGGATTATATTCCGAAAGATACCGAAA | |
| | TTCGTCTGACCATTGTTGGTAATAAACTGTTTGGCGCCAATATTAAATCAACCAAT | |
| | CAGGTTGATTGGCGCAAAAATGATGCACTGCTGGAATATAAACCGGCCAATATTCC | |
| | GGATAAAATTGCCAAAATGTGTCTGGAAATGATGGAAAAACTGGAAATTAATTTTG | |
| | CGGCGTTTGATTTTATTATTCGTAATGGTGATTATATTTTTCTGGAACTGAATGCC | |
| | AATGGTCAGTGGCTGTGGCTGGAAGATATTCTGAAATTTGATATTTCAAATACCAT | |
| | TATTAATTATCTGCTGGGTGAACCGATTTAATAATAA | |
| thcoK | ATGACGAGAACCAACACCGGCTATCGTTATCGCGCGTTCGGCCTGCGCATAGACTC | 232 |
| | AGATATTCCGCTGCCAGAATTAGGGGACGGTACGCGCCCTGATGGTGACGCGGATC | |
| | TGACGGTCGTCCGGTGTGGGGAAGCGGAGCCGGAATGGGCTGAAGGTGGTGGCGGG | |
| | GGTCGTCTGTATGCCGCTGAAGGCATTGTATCTTTTCGCGTGCCGCAGACGGCAGC | |
| | GTTCCGTATTACTAATGGAAATCGCATCGAGGTGCATGCCTACTCGGGGGCTGATG | |
| | AGGATCGAATACGCCTGTACGTGTTAGGGACCTGTATGGGAGCGCTGTTACTGCAA | |
| | CGTAGAATCTTACCGCTTCATGGTTCGGTCGTCGCCCGTGATGGTCGTGCGTATGC | |
| | CATAGTTGGCGAAAGCGGAGCGGGCAAATCCACGATGAGTGCAGCACTTCTCGAAC | |
| | GTGGATTCCGCCTCGTTACGGATGACGTGGCCGCCATCGTGTTCGATGAGCGTGGG | |
| | ACCCCACTGGTTATGCCGGCTTATCCACAGCAAAAACTGTGGCAGGATTCCCTGGA | |
| | CCGTCTGCAAATTGCGGGCTCGGGCCTTCGTCCGCTGTTCGAACGCGAAACGAAAT | |
| | ACGCTGTACCCGCGGATGGGGCATTCTGGCCCGAACCGGTTCCATTGGTGCACATT | |
| | TACGAACTGGTTCATAGCGATGGTCAAACGCCTGAACTGCAGCCGATTGCCAAATT | |
| | AGAGCGTTGCTATACCTTGTATCGCCACACATTTCGTAGAAGCCTGATCGTCCCCA | |
| | GCGGCTTAAGCGCCTGGCATTTTGAAACGGCAGTGAAACTTGCGGAGAAAACGGGG | |
| | ATGTACCGTCTTATGCGCCCGGCCAAAGTTTTCGCGGCTCGCGAATCTGCTCGGCT | |
| | GATTGAAACTCACGCCGATGGTGAAGTGTCACGTTAATAA | |

Wild-type Precursor Peptides

| | | |
|---|---|---|
| epiA | GAAGCAGTTAAAGAGAAGAACGATCTGTTCAACCTGGATGTTAAAGTCAACGCAAA | 233 |
| | AGAAAGTAACGATAGTGGCGCAGAACCACGCATAGCGTCGAAATTTATTTGCACAC | |
| | CAGGCTGCGCGAAAACGGGTTCGTTTAACAGCTATTGTTGTTAATAA | |
| lasA | ATGGACAAACGTGTGCGTTACGAAAAACCGAGCCTGGTGAAAGAGGGTACGTTTCG | 234 |
| | CAAAACTACCGCTGGCCTGCGGCGTCTGTTCGCTGACCAGCTGGTTGGCCGCCGTA | |
| | ACATTTAATAA | |
| paaP | ATGATTAAATTTTCTACATTGTCTCAGCGCATCAGCGCCATCACGGAAGAAAACGC | 235 |
| | CATGTACACTAAGGGTCAAGTGATCGTATTGAGCTGATAA | |
| padeA | AAAAAGCAATATAGCAAACCTAGCCTGGAGGTTCTGGACGTCCACCAGACCATGGC | 236 |
| | TGGCCCGGGCACTAGTACGCCAGACGCGTTTCAGCCAGATCCAGATGAAGATGTTC | |
| | ACTATGATTCGTAATAA | |
| palA | AAAGATCTTCTGAAGGAACTGATGTATGAAGTAGACCTCGAAGAGATGGAGAATCT | 237 |
| | TCAGGGTAGCGGGTACTCAGCCGCCCAGTGTGCCTGGATGGCGCTGAGCTGCGTCA | |
| | ATTACATCCCGGGAGTGGGATTCGGTTGTGGCGGCTACAGCGCATGTGAACTCTAC | |
| | AAGCGTTATTGTTAATAA | |
| plpA2 | ATGTCTATTGAGAGTGCAAAGGCTTTCTACCAGCGTATGACGGATGACGCATCTTT | 238 |
| | TCGTACCCCTTTTGAAGCGGAACTGTCGAAAGAGGAGCGCCAACAATTAATCAAAG | |
| | ATAGCGGATATGACTTTACTGCAGAAGAATGGCAACAGGCTATGACCGAGATCCAG | |
| | GCGGCACGCTCAAACGAGGAACTGAATGAGGAAGAACTCGAGGCAATTGCCGGGGG | |
| | CGCTGTGGCCGCAATGTATGGTGTGGTTTTCCCATGGGACAACGAGTTCCCGTGGC | |
| | CCCGCTGGGGCGGTTAATAA | |
| tgnA* | TATCGACCTTATATTGCCAAGTATGTCGAAGAACAAACTCTGCAGAATTCAACCAA | 239 |
| | CCTGGTATATGACGACATCACGCAGATCTCTTTTATCAATAAAGAAAAGAACGTGA | |
| | AAAAAATTAATCTGGGTCCCGATACTACGATCGTGACTGAAACCATCGAGAATGCG | |
| | GACCCCGATGAGTATTTCTTATAATAA | |
| thcoA | CGCAAGAAAGAATGGCAGACACCAGAACTGGAAGTACTCGATGTACGCCTCACCGC | 240 |
| | AGCGGGCCCGGGTAAAGCTAAACCGGATGCTGTGCAGCCAGACGAAGATGAAATAG | |
| | TGCACTACTCATAATAA | |

Plasmid Origins

| | | |
|---|---|---|
| pSC101 var2 | AGTAAGACGGGTAAGCCTGTTGATGATACCGCTGCCTTACTGGGTGCATTAGCCAG | 241 |
| | TCTGAATGACCTGTCACGGGATAATCCGAAGTGGTCAGACTGGAAAATCAGAGGGC | |
| | AGGAACTGCTGAACAGCAAAAAGTCAGATAGCACCACATAGCAGACCCGCCATAAA | |
| | ACGCCCTGAGAAGCCCGTGACGGGCTTTTCTTGTATTATGGGTAGTTTCCTTGCAT | |
| | GAATCCATAAAAGGCGCCTGTAGTGCCATTTACCCCCATTCACTGCCAGAGCCGTG | |
| | AGCGCAGCGAACTGAATGTCACGAAAAAGACAGCGACTCAGGTGCCTGATGGTCGG | |
| | AGACAAAAGGAATATTCAGCGATTTGCCCGAGCTTGCGAGGGTGCTACTTAAGCCT | |
| | TTAGGGTTTTAAGGTCTGTTTTGTAGAGGAGCAAACAGCGTTTGCGACATCCTTTT | |
| | GTAATACTGCGGAACTGACTAAAGTAGTGAGTTATACACAGGGCTGGGATCTATTC | |
| | TTTTTATCTTTTTTTATTCTTTCTTTATTCTATAAATTATAACCACTTGAATATAA | |
| | ACAAAAAAAACACACAAAGGTCTAGCGGAATTTACAGAGGGTCTAGCAGAATTTAC | |
| | AAGTTTTCCAGCAAAGGTCTAGCAGAATTTACAGATACCCACAACTCAAAGGAAAA | |
| | GGACTAGTAATTATCATTGACTAGCCCATCTCAATTGGTATAGTGATTAAAATCAC | |
| | CTAGACCAATTGAGATGTATGTCTGAATTAGTTGTTTTCAAAGCAAATGAACTAGC | |
| | GATTAGTCGCTATGACTTAACGGAGCATGAAACCAAGCTAATTTTATGCTGTGTGG | |
| | CACTACTCAACCCCACGATTGAAAACCCTACAAGGAAAGAACGGACGGTATCGTTC | |
| | ACTTATAACCAATACGCTCAGATGATGAACATCAGTAGGGAAAATGCTTATGGTGT | |
| | ATTAGCTAAAGCAACCAGAGAGCTGATGACGAGAACTGTGGAAATCAGGAATCCTT | |
| | TGGTTAAAGGCTTTTGGATTTTCCAGTGGACAAACTATGCCAAGTTCTCAAGCGAA | |
| | AAATTAGAATTAGTTTTTAGTGAAGAGATATTGCCTTATCTTTTCCAGTTAAAAAA | |
| | ATTCATAAAATATAATCTGGAACATGTTAAGTCTTTTGAAAACAAATACTCTATGA | |
| | GGATTTATGAGTGGTTATTAAAAGAACTAACACAAAAGAAAACTCACAAGGCAAAT | |
| | ATAGAGATTAGCCTTGATGAATTTAAGTTCATGTTAATGCTTGAAAATAACTACCA | |
| | TGAGTTTAAAAGGCTTAACCAATGGGTTTTGAAACCAATAAGTAAAGATTTAAACA | |
| | CTTACAGCAATATGAAATTGGTGGTTGATAAGCGAGGCCGCCCGACTGATACGTTG | |
| | ATTTTCCAAGTTGAACTAGATAGACAAATGGATCTCGTAACCGAACTTGAGAACAA | |
| | CCAGATAAAAATGAATGGTGACAAAATACCAACAACCATTACATCAGATTCCTACC | |
| | TACATAACGGACTAAGAAAAACACTACACGATGCTTTAACTGCAAAAATTCAGCTC | |
| | ACCAGTTTTGAGGCAAAATTTTTGAGTGACATGCAAAGTAAGTATGATCTCAATGG | |
| | TTCGTTCTCATGGCTCACGCAAAAACAACGAACCACACTAGAGAACATACTGGCTA | |
| | AATACGGAAGGATCTGAGGTTCTTATGGCTCTTGTATCTATCAGTGAAGCATCAAG | |
| | ACTAACAAACAAAAGTAGAACAACTGTTCACCGTTACATATCAAAGGGAAAACTGT | |
| | CCATATGCACAGATGAAAACGGTGTAAAAAAGATAGATACATCAGAGCTTTTACGA | |
| | GTTTTTGGTGCATTCAAAGCTGTTCACCATGAACAGATCGACAATGTAACAGATGA | |
| | ACAGCATGTAACACCTAATAGAACAGGTGAAACCAGTAAAACAAAGCAACTAGAAC | |
| | ATGAAATTGAACACCTGAGACAACTTGTTACAGCTCAACAGTCACACATAGACAGC | |
| | CTGAAACAGGCGATGCTGCTTATCGAATCAAAGCTGCCGACAACACGGGAGCCAGT | |
| | GACGCCTCCCGTGGGGAAAAAATCATGGCAATTCTGGAAGAAATAGCGCTTTCAGC | |
| | CGGCAAACCGGCTGAAGCCGGATCTGCGATTCTGATAACAAACTAGCAACACCAGA | |
| | ACAGCCCGTTTGCGGGCAGCAAAACCCGTAC | |
| p15A | TTAATAAGATGATCTTCTTGAGATCGTTTTGGTCTGCGCGTAATCTCTTGCTCTGA | 242 |
| | AAACGAAAAAACCGCCTTGCAGGGCGGTTTTTCGAAGGTTCTCTGAGCTACCAACT | |
| | CTTTGAACCGAGGTAACTGGCTTGGAGGAGCGCAGTCACCAAAACTTGTCCTTTCA | |
| | GTTTAGCCTTAACCGGCGCATGACTTCAAGACTAACTCCTCTAAATCAATTACCAG | |
| | TGGCTGCTGCCAGTGGTGCTTTTGCATGTCTTTCCGGGTTGGACTCAAGACGATAG | |
| | TTACCGGATAAGGCGCAGCGGTCGGACTGAACGGGGGGTTCGTGCATACAGTCCAG | |
| | CTTGGAGCGAACTGCCTACCCGGAACTGAGTGTCAGGCGTGGAATGAGACAAACGC | |
| | GGCCATAACAGCGGAATGACACCGGTAAACCGAAAGGCAGGAACAGGAGAGCGCAC | |
| | GAGGGAGCCGCCAGGGGAAACGCCTGGTATCTTTATAGTCCTGTCGGGTTTCGCCA | |
| | CCACTGATTTGAGCGTCAGATTTCGTGATGCTTGTCAGGGGGGCGGAGCCTATGGA | |
| | AAAACGGCTTTGCCGCGGCCCTCTCACTTCCCTGTTAAGTATCTTCCTGGCATCTT | |
| | CCAGGAAATCTCCGCCCCGTTCGTAAGCCATTTCCGCTCGCCGCAGTCGAACGACC | |
| | GAGCGTAGCGAGTCAGTGAGCGAGGAAGCGGAATATATCCTGTATCACATATTCTG | |
| | CTGACGCACCGGTGCAGCCTTTTTTCTCCTGCCACATGAAGCACTTCACTGACACC | |
| | CTCATCAGTGCCAACATAGTAAGCCAGTATACACTCCGCTA | |

^{a}PlpXY genes were synthesized/expressed as RBS_{PLpX} + PlpX + RBS_{PlpY} + PlpY.

TABLE 10
Plasmid backbone/chassis sequences.

| | | SEQ |
|---|---|---|
| | | ID |
| Name | Sequence^{a} | NO |
| N-term SUMO | CACATTTCCCCGAAAAGTGCCACCTGACGTCTAAGAAACCATTATTATCATGACATTAA | 243 |
| Backbone 2 | CCTATAAAAATAGGCGTATCACGAGGCAGAATTTCAGATAAAAAAAATCCTTAGCTTTC | |
| | GCTAAGGATGATTTCTGGAATTCGCGGCCGCTTCTAGAGGGAGAACGATCGTTGGCTGa | |
| | atcataaaaaatttatttgctttgtgagcggataacaattataatagattcaattgtga | |
| | [chemical structure] | |
| | TTACCACCATCACCATCATCACGGGTCCCTGCAGGACTCAGAAGTCAATCAAGAAGCTA | |
| | AGCCAGAGGTCAAGCCAGAAGTCAAGCCTGAGACTCACATCAATTTAAAGGTGTCCGAT | |
| | GGATCTTCAGAGATCTTCTTCAAGATCAAAAAGACCACTCCTTTAAGAAGGCTGATGGA | |
| | AGCGTTCGCTAAAAGACAGGGTAAGGAAATGGACTCCTTAAGATTCTTGTACGACGGTA | |
| | TTAGAATTCAAGCTGATCAGGCCCCTGAAGATTTGGACATGGAGGATAACGATATTATT | |
| | GAGGCTCACCGCGAACAGATTGGAGGTTGCATGTCATATTACGACTCCATTCCCACAAG | |
| | CGAGAACTTGTACTTTCAAGGGTGCATGAGCAAAGGAGAAGAACTTTTCACTGGAGTTG | |
| | TCCCAATTCTTGTTGAATTAGATGGTGATGTTAATGGGCACAAATTTTCTGTCCGTGGA | |
| | GAGGGTGAAGGTGATGCTACAAACGGAAAACTCACCCTTAAATTTATTTGCACTACTGG | |
| | AAAACTACCTGTTCCGTGGCCAACACTTGTCACTACTCTGACCTATGGTGTTCAATGCT | |
| | TTTCCCGTTATCCGGATCACATGAAACGGCATGACTTTTTCAAGAGTGCCATGCCCGAA | |
| | GGTTATGTACAGGAACGCACTATATCTTTCAAAGATGACGGGACCTACAAGACGCGTGC | |
| | TGAAGTCAAGTTTGAAGGTGATACCCTTGTTAATCGTATCGAGTTAAAGGGTATTGATT | |
| | TTAAAGAAGATGGAAACATTCTTGGACACAAACTCGAGTACAACTTTAACTCACACAAT | |
| | GTATACATCACGGCAGACAAACAAAAGAATGGAATCAAAGCTAACTTCAAAATTCGCCA | |
| | CAACGTTGAAGATGGTTCCGTTCAACTAGCAGACCATTATCAACAAAATACTCCAATTG | |
| | GCGATGGCCCTGTCCTTTTACCAGACAACCATTACCTGTCGACACAATCTGTCCTTTCG | |
| | AAAGATCCCAACGAAAAGCGTGACCACATGGTCCTTCTTGAGTTTGTAACTGCTGCTGG | |
| | GATTACACATGGCATGGATGAGCTCTACAAATAATTCAGCCAAAAAACTTAAGACCGCC | |
| | GGTCTTGTCCACTACCTTGCAGTAATGCGGTGGACAGGATCGGCGGTTTTCTTTTCTCT | |
| | TCTCAACCAATGgcggcgcgccatcgaatggcgcaaaacctttcgcggtatggcatgat | |
| | [chemical structure] | |
| | GTCGCAGAGTATGCCGGTGTCTCTTATCAGACCGTTTCCCGCGTGGTGAACCAGGCCAG | |
| | CCACGTTTCTGCGAAAACGCGGGAAAAAGTGGAAGCGGCGATGGCGGAGCTGAATTACA | |
| | TTCCCAACCGCGTGGCACAACAACTGGCGGGCAAACAGTCGTTGCTTATTGGCGTTGCC | |
| | ACCTCCAGTCTGGCCCTGCACGCGCCGTCGCAAATTGTCGCGGCGATTAAATCTCGCGC | |
| | CGATCAACTGGGTGCCAGCGTGGTGGTGTCGATGGTAGAACGAAGCGGCGTCGAAGCCT | |
| | GTAAAGCGGCGGTGCACAATCTTCTCGCGCAACGCGTCAGTGGGCTGATCATTAACTAT | |
| | CCGCTGGATGACCAGGATGCCATTGCTGTGGAAGCTGCCTGCACTAATGTTCCGGCGTT | |
| | ATTTCTTGATGTCTCTGACCAGACACCCATCAACAGTATTATTTTCTCCCATGAGGACG | |
| | GTACGCGACTGGGCGTGGAGCATCTGGTCGCATTGGGTCACCAGCAAATCGCGCTGTTA | |
| | GCGGGCCCATTAAGTTCTGTCTCGGCGCGTCTGCGTCTGGCTGGCTGGCATAAATATCT | |
| | CACTCGCAATCAAATTCAGCCGATAGCGGAACGGGAAGGCGACTGGAGTGCCATGTCCG | |
| | GTTTTCAACAAACCATGCAAATGCTGAATGAGGGCATCGTTCCCACTGCGATGCTGGTT | |
| | GCCAACGATCAGATGGCGCTGGGCGCAATGCGCGCCATTACCGAGTCCGGGCTGCGCGT | |
| | TGGTGCGGATATCTCGGTAGTGGGATACGACGATACCGAAGATAGCTCATGTTATATCC | |
| | CGCCGTTAACCACCATCAAACAGGATTTTCGCCTGCTGGGGCAAACCAGCGTGGACCGC | |
| | TTGCTGCAACTCTCTCAGGGCCAGGCGGTGAAGGGCAATCAGCTGTTGCCAGTCTCACT | |
| | GGTGAAAAGAAAAACCACCCTGGCGCCCAATACGCAAACCGCCTCTCCCCGCGCGTTGG | |
| | CCGATTCATTAATGCAGCTGGCACGACAGGTTTCCCGACTGGAAAGCGGGCAGTGATAA | |
| | TTGGTAACGAATCAGACAATTGACGGCTCGAGGGAGTAGCATAGGGTTTGCAGAATCCC | |
| | TGCTTCGTCCATTTGACAGGCACATTATGCATCGATGATAAGCTGTCAAACATGAGCAC | |
| | GCTTACTAGTAGCGGCCGCTGCAGTCCGGCAAAAAAGGGCAAGGTGTCACCACCCTGCC | |
| | CTTTTTCTTTAAAACCGAAAAGATTACTTCGCGTTATGCAGGCTTCCTCGCTCACTGAC | |
| | TCGCTGCGCTCGGTCGTTCGGCTGCGGCGAGCGGTATCAGCTCACTCAAAGGCGGTAAT | |
| | GACAGTAAGACGGGTAAGCCTGTTGATGATACCGCTGCCTTACTGGGTGCATTAGCCAG | |
| | TCTGAATGACCTGTCACGGGATAATCCGAAGTGGTCAGACTGGAAAATCAGAGGGCAGG | |
| | AACTGCTGAACAGCAAAAAGTCAGATAGCACCACATAGCAGACCCGCCATAAAACGCCC | |
| | TGAGAAGCCCGTGACGGGCTTTTCTTGTATTATGGGTAGTTTCCTTGCATGAATCCATA | |
| | AAAGGCGCCTGTAGTGCCATTTACCCCCATTCACTGCCAGAGCCGTGAGCGCAGCGAAC | |
| | TGAATGTCACGAAAAAGACAGCGACTCAGGTGCCTGATGGTCGGAGACAAAAGGAATAT | |
| | TCAGCGATTTGCCCGAGCTTGCGAGGGTGCTACTTAAGCCTTTAGGGTTTTAAGGTCTG | |
| | TTTTGTAGAGGAGCAAACAGCGTTTGCGACATCCTTTTGTAATACTGCGGAACTGACTA | |
| | AAGTAGTGAGTTATACACAGGGCTGGGATCTATTCTTTTTATCTTTTTTTATTCTTTCT | |
| | TTATTCTATAAATTATAACCACTTGAATATAAACAAAAAAAACACACAAAGGTCTAGCG | |
| | GAATTTACAGAGGGTCTAGCAGAATTTACAAGTTTTCCAGCAAAGGTCTAGCAGAATTT | |
| | ACAGATACCCACAACTCAAAGGAAAAGGACTAGTAATTATCATTGACTAGCCCATCTCA | |
| | ATTGGTATAGTGATTAAAATCACCTAGACCAATTGAGATGTATGTCTGAATTAGTTGTT | |
| | TTCAAAGCAAATGAACTAGCGATTAGTCGCTATGACTTAACGGAGCATGAAACCAAGCT | |
| | AATTTTATGCTGTGTGGCACTACTCAACCCCACGATTGAAAACCCTACAAGGAAAGAAC | |
| | GGACGGTATCGTTCACTTATAACCAATACGCTCAGATGATGAACATCAGTAGGGAAAAT | |
| | GCTTATGGTGTATTAGCTAAAGCAACCAGAGAGCTGATGACGAGAACTGTGGAAATCAG | |
| | GAATCCTTTGGTTAAAGGCTTTTGGATTTTCCAGTGGACAAACTATGCCAAGTTCTCAA | |
| | GCGAAAAATTAGAATTAGTTTTTAGTGAAGAGATATTGCCTTATCTTTTCCAGTTAAAA | |
| | AAATTCATAAAATATAATCTGGAACATGTTAAGTCTTTTGAAAACAAATACTCTATGAG | |
| | GATTTATGAGTGGTTATTAAAAGAACTAACACAAAAGAAAACTCACAAGGCAAATATAG | |
| | AGATTAGCCTTGATGAATTTAAGTTCATGTTAATGCTTGAAAATAACTACCATGAGTTT | |
| | AAAAGGCTTAACCAATGGGTTTTGAAACCAATAAGTAAAGATTTAAACACTTACAGCAA | |
| | TATGAAATTGGTGGTTGATAAGCGAGGCCGCCCGACTGATACGTTGATTTTCCAAGTTG | |
| | AACTAGATAGACAAATGGATCTCGTAACCGAACTTGAGAACAACCAGATAAAAATGAAT | |
| | GGTGACAAAATACCAACAACCATTACATCAGATTCCTACCTACATAACGGACTAAGAAA | |
| | AACACTACACGATGCTTTAACTGCAAAAATTCAGCTCACCAGTTTTGAGGCAAAATTTT | |
| | TGAGTGACATGCAAAGTAAGTATGATCTCAATGGTTCGTTCTCATGGCTCACGCAAAAA | |
| | CAACGAACCACACTAGAGAACATACTGGCTAAATACGGAAGGATCTGAGGTTCTTATGG | |
| | CTCTTGTATCTATCAGTGAAGCATCAAGACTAACAAACAAAAGTAGAACAACTGTTCAC | |
| | CGTTACATATCAAAGGGAAAACTGTCCATATGCACAGATGAAAACGGTGTAAAAAAGAT | |
| | AGATACATCAGAGCTTTTACGAGTTTTTGGTGCATTCAAAGCTGTTCACCATGAACAGA | |
| | TCGACAATGTAACAGATGAACAGCATGTAACACCTAATAGAACAGGTGAAACCAGTAAA | |
| | ACAAAGCAACTAGAACATGAAATTGAACACCTGAGACAACTTGTTACAGCTCAACAGTC | |
| | ACACATAGACAGCCTGAAACAGGCGATGCTGCTTATCGAATCAAAGCTGCCGACAACAC | |
| | GGGAGCCAGTGACGCCTCCCGTGGGGAAAAAATCATGGCAATTCTGGAAGAAATAGCGC | |
| | TTTCAGCCGGCAAACCGGCTGAAGCCGGATCTGCGATTCTGATAACAAACTAGCAACAC | |
| | CAGAACAGCCCGTTTGCGGGCAGCAAAACCCGTACCGATTATCAAAAAGGATCTTCACC | |
| | TAGATCCTTTTAAATTAAAAATGAAGTTTTAAATCAATCTAAAGTATATATGAGTAAAC | |
| | TTGGTCTGACAGTTACCAATGCTTAATCAGTGAGGCACCTATCTCAGCGATCTGTCTAT | |
| | TTCGTTCATCCATAGTTGCCTGACTCCCCGTCGTGTAGATAACTACGATACGGGAGGGC | |
| | TTACCATCTGGCCCCAGTGCTGCAATGATACCGCGAGAACCACGCTCACCGGCTCCAGA | |
| | TTTATCAGCAATAAACCAGCCAGCCGGAAGGGCCGAGCGCAGAAGTGGTCCTGCAACTT | |
| | TATCCGCCTCCATCCAGTCTATTAATTGTTGCCGGGAAGCTAGAGTAAGTAGTTCGCCA | |
| | GTTAATAGTTTGCGCAACGTTGTTGCCATTGCTACAGGCATCGTGGTGTCACGCTCGTC | |
| | GTTTGGTATGGCTTCATTCAGCTCCGGTTCCCAACGATCAAGGCGAGTTACATGATCCC | |
| | CCATGTTGTGCAAAAAAGCGGTTAGCTCCTTCGGTCCTCCGATCGTTGTCAGAAGTAAG | |
| | TTGGCCGCAGTGTTATCACTCATGGTTATGGCAGCACTGCATAATTCTCTTACTGTCAT | |
| | GCCATCCGTAAGATGCTTTTCTGTGACTGGTGAGTACTCAACCAAGTCATTCTGAGAAT | |
| | AGTGTATGCGGCGACCGAGTTGCTCTTGCCCGGCGTCAATACGGGATAATACCGCGCCA | |
| | CATAGCAGAACTTTAAAAGTGCTCATCATTGGAAAACGTTCTTCGGGGCGAAAACTCTC | |
| | AAGGATCTTACCGCTGTTGAGATCCAGTTCGATATAACCCACTCGTGCACCCAACTGAT | |
| | CTTCAGCATCTTTTACTTTCACCAGCGTTTCTGGGTGAGCAAAAACAGGAAGGCAAAAT | |
| | GCCGCAAAAAAGGGAATAAGGGCGACACGGAAATGTTGAATACTCATACTCTTCCTTTT | |
| | TCAATATTATTGAAGCATTTATCAGGGTTATTGTCTCATGAGCGGATACATATTTGAAT | |
| | GTATTTAGAAAAATAAACAAATAGGGGTTCCGCG | |
| N-term SUMO | CACATTTCCCCGAAAAGTGCCACCTGACGTCTAAGAAACCATTATTATCATGACATTAA | 244 |
| Backbone 3 | CCTATAAAAATAGGCGTATCACGAGGCAGAATTTCAGATAAAAAAAATCCTTAGCTTTC | |
| | GCTAAGGATGATTTCTGGAATTCGCGGCCGCTTCTAGAGGGAGGGTCTCAGTGCAACGA | |
| | TCGTTGGCTGaatcataaaaaatttatttgctttgtgagcggataacaattataataga | |
| | [chemical structure] | |
| | [chemical structure] | |
| | TCAAGAAGCTAAGCCAGAGGTCAAGCCAGAAGTCAAGCCTGAGACTCACATCAATTTAA | |
| | AGGTGTCCGATGGATCTTCAGAGATCTTCTTCAAGATCAAAAAGACCACTCCTTTAAGA | |
| | AGGCTGATGGAAGCGTTCGCTAAAAGACAGGGTAAGGAAATGGACTCCTTAAGATTCTT | |
| | GTACGACGGTATTAGAATTCAAGCTGATCAGGCCCCTGAAGATTTGGACATGGAGGATA | |
| | ACGATATTATTGAGGCTCACCGCGAACAGATTGGAGGTTGCATGTCATATTACGACTCC | |
| | ATTCCCACAAGCGAGAACTTGTACTTTCAAGGGTGCATGAGCAAAGGAGAAGAACTTTT | |
| | CACTGGAGTTGTCCCAATTCTTGTTGAATTAGATGGTGATGTTAATGGGCACAAATTTT | |
| | CTGTCCGTGGAGAGGGTGAAGGTGATGCTACAAACGGAAAACTCACCCTTAAATTTATT | |
| | TGCACTACTGGAAAACTACCTGTTCCGTGGCCAACACTTGTCACTACTCTGACCTATGG | |
| | TGTTCAATGCTTTTCCCGTTATCCGGATCACATGAAACGGCATGACTTTTTCAAGAGTG | |
| | CCATGCCCGAAGGTTATGTACAGGAACGCACTATATCTTTCAAAGATGACGGGACCTAC | |
| | AAGACGCGTGCTGAAGTCAAGTTTGAAGGTGATACCCTTGTTAATCGTATCGAGTTAAA | |
| | GGGTATTGATTTTAAAGAAGATGGAAACATTCTTGGACACAAACTCGAGTACAACTTTA | |
| | ACTCACACAATGTATACATCACGGCAGACAAACAAAAGAATGGAATCAAAGCTAACTTC | |
| | AAAATTCGCCACAACGTTGAAGATGGTTCCGTTCAACTAGCAGACCATTATCAACAAAA | |
| | TACTCCAATTGGCGATGGCCCTGTCCTTTTACCAGACAACCATTACCTGTCGACACAAT | |
| | CTGTCCTTTCGAAAGATCCCAACGAAAAGCGTGACCACATGGTCCTTCTTGAGTTTGTA | |
| | ACTGCTGCTGGGATTACACATGGCATGGATGAGCTCTACAAATAATTCAGCCAAAAAAC | |
| | TTAAGACCGCCGGTCTTGTCCACTACCTTGCAGTAATGCGGTGGACAGGATCGGCGGTT | |
| | TTCTTTTCTCTTCTCAACAAGTGAGACCATGGgcggcgcgccatcgaatggcgcaaaac | |
| | [chemical structure] | |
| | AACCAGTAACGTTATACGATGTCGCAGAGTATGCCGGTGTCTCTTATCAGACCGTTTCC | |
| | CGCGTGGTGAACCAGGCCAGCCACGTTTCTGCGAAAACGCGGGAAAAAGTGGAAGCGGC | |
| | GATGGCGGAGCTGAATTACATTCCCAACCGCGTGGCACAACAACTGGCGGGCAAACAGT | |
| | CGTTGCTTATTGGCGTTGCCACCTCCAGTCTGGCCCTGCACGCGCCGTCGCAAATTGTC | |
| | GCGGCGATTAAATCTCGCGCCGATCAACTGGGTGCCAGCGTGGTGGTGTCGATGGTAGA | |
| | ACGAAGCGGCGTCGAAGCCTGTAAAGCGGCGGTGCACAATCTTCTCGCGCAACGCGTCA | |
| | GTGGGCTGATCATTAACTATCCGCTGGATGACCAGGATGCCATTGCTGTGGAAGCTGCC | |
| | TGCACTAATGTTCCGGCGTTATTTCTTGATGTCTCTGACCAGACACCCATCAACAGTAT | |
| | TATTTTCTCCCATGAGGACGGTACGCGACTGGGCGTGGAGCATCTGGTCGCATTGGGTC | |
| | ACCAGCAAATCGCGCTGTTAGCGGGCCCATTAAGTTCTGTCTCGGCGCGTCTGCGTCTG | |
| | GCTGGCTGGCATAAATATCTCACTCGCAATCAAATTCAGCCGATAGCGGAACGGGAAGG | |
| | CGACTGGAGTGCCATGTCCGGTTTTCAACAAACCATGCAAATGCTGAATGAGGGCATCG | |
| | TTCCCACTGCGATGCTGGTTGCCAACGATCAGATGGCGCTGGGCGCAATGCGCGCCATT | |
| | ACCGAGTCCGGGCTGCGCGTTGGTGCGGATATCTCGGTAGTGGGATACGACGATACCGA | |
| | AGATAGCTCATGTTATATCCCGCCGTTAACCACCATCAAACAGGATTTTCGCCTGCTGG | |
| | GGCAAACCAGCGTGGACCGCTTGCTGCAACTCTCTCAGGGCCAGGCGGTGAAGGGCAAT | |
| | CAGCTGTTGCCAGTCTCACTGGTGAAAAGAAAAACCACCCTGGCGCCCAATACGCAAAC | |
| | CGCCTCTCCCCGCGCGTTGGCCGATTCATTAATGCAGCTGGCACGACAGGTTTCCCGAC | |
| | TGGAAAGCGGGCAGTGATAATTGGTAACGAATCAGACAATTGACGGCTCGAGGGAGTAG | |
| | CATAGGGTTTGCAGAATCCCTGCTTCGTCCATTTGACAGGCACATTATGCATCGATGAT | |
| | AAGCTGTCAAACATGAGCACGCTTACTAGTAGCGGCCGCTGCAGTCCGGCAAAAAAGGG | |
| | CAAGGTGTCACCACCCTGCCCTTTTTCTTTAAAACCGAAAAGATTACTTCGCGTTATGC | |
| | AGGCTTCCTCGCTCACTGACTCGCTGCGCTCGGTCGTTCGGCTGCGGCGAGCGGTATCA | |
| | GCTCACTCAAAGGCGGTAATGACAGTAAGACGGGTAAGCCTGTTGATGATACCGCTGCC | |
| | TTACTGGGTGCATTAGCCAGTCTGAATGACCTGTCACGGGATAATCCGAAGTGGTCAGA | |
| | CTGGAAAATCAGAGGGCAGGAACTGCTGAACAGCAAAAAGTCAGATAGCACCACATAGC | |
| | AGACCCGCCATAAAACGCCCTGAGAAGCCCGTGACGGGCTTTTCTTGTATTATGGGTAG | |
| | TTTCCTTGCATGAATCCATAAAAGGCGCCTGTAGTGCCATTTACCCCCATTCACTGCCA | |
| | GAGCCGTGAGCGCAGCGAACTGAATGTCACGAAAAAGACAGCGACTCAGGTGCCTGATG | |
| | GTCGGAGACAAAAGGAATATTCAGCGATTTGCCCGAGCTTGCGAGGGTGCTACTTAAGC | |
| | CTTTAGGGTTTTAAGGTCTGTTTTGTAGAGGAGCAAACAGCGTTTGCGACATCCTTTTG | |
| | TAATACTGCGGAACTGACTAAAGTAGTGAGTTATACACAGGGCTGGGATCTATTCTTTT | |
| | TATCTTTTTTTATTCTTTCTTTATTCTATAAATTATAACCACTTGAATATAAACAAAAA | |
| | AAACACACAAAGGTCTAGCGGAATTTACAGAGGGTCTAGCAGAATTTACAAGTTTTCCA | |
| | GCAAAGGTCTAGCAGAATTTACAGATACCCACAACTCAAAGGAAAAGGACTAGTAATTA | |
| | TCATTGACTAGCCCATCTCAATTGGTATAGTGATTAAAATCACCTAGACCAATTGAGAT | |
| | GTATGTCTGAATTAGTTGTTTTCAAAGCAAATGAACTAGCGATTAGTCGCTATGACTTA | |
| | ACGGAGCATGAAACCAAGCTAATTTTATGCTGTGTGGCACTACTCAACCCCACGATTGA | |
| | AAACCCTACAAGGAAAGAACGGACGGTATCGTTCACTTATAACCAATACGCTCAGATGA | |
| | TGAACATCAGTAGGGAAAATGCTTATGGTGTATTAGCTAAAGCAACCAGAGAGCTGATG | |
| | ACGAGAACTGTGGAAATCAGGAATCCTTTGGTTAAAGGCTTTTGGATTTTCCAGTGGAC | |
| | AAACTATGCCAAGTTCTCAAGCGAAAAATTAGAATTAGTTTTTAGTGAAGAGATATTGC | |
| | CTTATCTTTTCCAGTTAAAAAAATTCATAAAATATAATCTGGAACATGTTAAGTCTTTT | |
| | GAAAACAAATACTCTATGAGGATTTATGAGTGGTTATTAAAAGAACTAACACAAAAGAA | |
| | AACTCACAAGGCAAATATAGAGATTAGCCTTGATGAATTTAAGTTCATGTTAATGCTTG | |
| | AAAATAACTACCATGAGTTTAAAAGGCTTAACCAATGGGTTTTGAAACCAATAAGTAAA | |
| | GATTTAAACACTTACAGCAATATGAAATTGGTGGTTGATAAGCGAGGCCGCCCGACTGA | |
| | TAGGTTGATTTTCCAAGTTGAACTAGATAGACAAATGGATCTCGTAACCGAACTTGAGA | |
| | ACAACCAGATAAAAATGAATGGTGACAAAATACCAACAACCATTACATCAGATTCCTAC | |
| | CTACATAACGGACTAAGAAAAACACTACACGATGCTTTAACTGCAAAAATTCAGCTCAC | |
| | CAGTTTTGAGGCAAAATTTTTGAGTGACATGCAAAGTAAGTATGATCTCAATGGTTCGT | |
| | TCTCATGGCTCACGCAAAAACAACGAACCACACTAGAGAACATACTGGCTAAATACGGA | |
| | AGGATCTGAGGTTCTTATGGCTCTTGTATCTATCAGTGAAGCATCAAGACTAACAAACA | |
| | AAAGTAGAACAACTGTTCACCGTTACATATCAAAGGGAAAACTGTCCATATGCACAGAT | |
| | GAAAACGGTGTAAAAAAGATAGATACATCAGAGCTTTTACGAGTTTTTGGTGCATTCAA | |
| | AGCTGTTCACCATGAACAGATCGACAATGTAACAGATGAACAGCATGTAACACCTAATA | |
| | GAACAGGTGAAACCAGTAAAACAAAGCAACTAGAACATGAAATTGAACACCTGAGACAA | |
| | CTTGTTACAGCTCAACAGTCACACATAGACAGCCTGAAACAGGCGATGCTGCTTATCGA | |
| | ATCAAAGCTGCCGACAACACGGGAGCCAGTGACGCCTCCCGTGGGGAAAAAATCATGGC | |
| | AATTCTGGAAGAAATAGCGCTTTCAGCCGGCAAACCGGCTGAAGCCGGATCTGCGATTC | |
| | TGATAACAAACTAGCAACACCAGAACAGCCCGTTTGCGGGCAGCAAAACCCGTACCGAT | |
| | TATCAAAAAGGATCTTCACCTAGATCCTTTTAAATTAAAAATGAAGTTTTAAATCAATC | |
| | TAAAGTATATATGAGTAAACTTGGTCTGACAGTTACCAATGCTTAATCAGTGAGGCACC | |
| | TATCTCAGCGATCTGTCTATTTCGTTCATCCATAGTTGCCTGACTCCCCGTCGTGTAGA | |
| | TAACTACGATACGGGAGGGCTTACCATCTGGCCCCAGTGCTGCAATGATACCGCGAGAA | |
| | CCACGCTCACCGGCTCCAGATTTATCAGCAATAAACCAGCCAGCCGGAAGGGCCGAGCG | |
| | CAGAAGTGGTCCTGCAACTTTATCCGCCTCCATCCAGTCTATTAATTGTTGCCGGGAAG | |
| | CTAGAGTAAGTAGTTCGCCAGTTAATAGTTTGCGCAACGTTGTTGCCATTGCTACAGGC | |
| | ATCGTGGTGTCACGCTCGTCGTTTGGTATGGCTTCATTCAGCTCCGGTTCCCAACGATC | |
| | AAGGCGAGTTACATGATCCCCCATGTTGTGCAAAAAAGCGGTTAGCTCCTTCGGTCCTC | |
| | CGATCGTTGTCAGAAGTAAGTTGGCCGCAGTGTTATCACTCATGGTTATGGCAGCACTG | |
| | CATAATTCTCTTACTGTCATGCCATCCGTAAGATGCTTTTCTGTGACTGGTGAGTACTC | |
| | AACCAAGTCATTCTGAGAATAGTGTATGCGGCGACCGAGTTGCTCTTGCCCGGCGTCAA | |
| | TACGGGATAATACCGCGCCACATAGCAGAACTTTAAAAGTGCTCATCATTGGAAAACGT | |
| | TCTTCGGGGCGAAAACTCTCAAGGATCTTACCGCTGTTGAGATCCAGTTCGATATAACC | |
| | CACTCGTGCACCCAACTGATCTTCAGCATCTTTTACTTTCACCAGCGTTTCTGGGTGAG | |
| | CAAAAACAGGAAGGCAAAATGCCGCAAAAAAGGGAATAAGGGCGACACGGAAATGTTGA | |
| | ATACTCATACTCTTCCTTTTTCAATATTATTGAAGCATTTATCAGGGTTATTGTCTCAT | |
| | GAGCGGATACATATTTGAATGTATTTAGAAAAATAAACAAATAGGGGTTCCGCG | |
| Cumate | AACACCCCTTGTATTACTGTTTATGTAAGCAGACAGTTTTATTGTTCATGATGATATAT | 245 |
| Modifying | TTTTATCTTGTGCAATGTACATCAGAGATTTTGAGACACAACCAATTATTGAAGGCCTC | |
| Enzyme | CCTAACGGGGGGCCTTTTTTTGTTTCTGGTCTCCCAAGCGCTTAACGATCGTTGGCTGa | |
| Backbone | acaaacagacaatctggtctgtttgtattatggaaaatttttctgtataatagattcaa | |
| | caaacagacaatctggtctgtttgtattatCAGCGGTCAACGCATGTGCTTTGCGTTCT | |
| | [chemical structure] | |
| | [chemical structure] | |
| | TGTTGAATTAGATGGTGATGTTAATGGGCACAAATTTTCTGTCCGTGGAGAGGGTGAAG | |
| | GTGATGCTACAAACGGAAAACTCACCCTTAAATTTATTTGCACTACTGGAAAACTACCT | |
| | GTTCCGTGGCCAACACTTGTCACTACTCTGACCTATGGTGTTCAATGCTTTTCCCGTTA | |
| | TCCGGATCACATGAAACGGCATGACTTTTTCAAGAGTGCCATGCCCGAAGGTTATGTAC | |
| | AGGAACGCACTATATCTTTCAAAGATGACGGGACCTACAAGACGCGTGCTGAAGTCAAG | |
| | TTTGAAGGTGATACCCTTGTTAATCGTATCGAGTTAAAGGGTATTGATTTTAAAGAAGA | |
| | TGGAAACATTCTTGGACACAAACTCGAGTACAACTTTAACTCACACAATGTATACATCA | |
| | CGGCAGACAAACAAAAGAATGGAATCAAAGCTAACTTCAAAATTCGCCACAACGTTGAA | |
| | GATGGTTCCGTTCAACTAGCAGACCATTATCAACAAAATACTCCAATTGGCGATGGCCC | |
| | TGTCCTTTTACCAGACAACCATTACCTGTCGACACAATCTGTCCTTTCGAAAGATCCCA | |
| | ACGAAAAGCGTGACCACATGGTCCTTCTTGAGTTTGTAACTGCTGCTGGGATTACACAT | |
| | GGCATGGATGAGCTCTACAAATAATGAAGAGCGCAGAGGTGGTTGTGTTGCGAAAAAAA | |
| | AAAAAAACACCCTAACGGGTGTTTTTTTTTTTTTGGTGTCCCCACGTGTGGCGCTGGAG | |
| | ACCGTCCAATGgcggcgcgccatcgaatggtgcaaaacctttcgcggtatggcatgata | |
| | [chemical structure] | |
| | CAGAACGTGCAATGGAAACCCAGGGTAAACTGATTGCAGCAGCACTGGGTGTTCTGCGT | |
| | GAAAAAGGTTATGCAGGTTTTCGTATTGCAGATGTTCCGGGTGCAGCCGGTGTTAGCCG | |
| | TGGTGCACAGAGCCATCATTTTCCGACCAAACTGGAACTGCTGCTGGCAACCTTTGAAT | |
| | GGCTGTATGAGCAGATTACCGAACGTAGCCGTGCACGTCTGGCAAAACTGAAACCGGAA | |
| | GATGATGTTATTCAGCAGATGCTGGATGATGCAGCAGATTTTTTTCTGGATGATGATTT | |
| | TAGCATCGGCCTGGATCTGATTGTTGCAGCAGATCGTGATCCGGCACTGCGTGAAGGTA | |
| | TTCTGCGTACCGTTGAACGTAATCGTTTTGTTGTTGAAGATATGTGGCTGGGTGTGCTG | |
| | GTGAGCCGTGGTCTGAGCCGTGATGATGCCGAAGATATTCTGTGGCTGATTTTTAACAG | |
| | CGTTCGTGGTCTGACAGTTCGTAGCCTGTGGCAGAAAGATAAAGAACGTTTTGAACGTG | |
| | TGCGTAATAGCACCCTGGAAATTGCACGTGAACGTTATGCAAAATTCAAACGTTGATAA | |
| | GGATCCTAATTGGTAACGAATCAGACAATTGACGGCTCGAGGGAGTAGCATAGGGTTTG | |
| | CAGAATCCCTGCTTCGTCCATTTGACAGGCACATTATGCATCGATGATAAGCTGTCAAA | |
| | CATGAGCAGATCCTCTACGCCGGACGCATCGTGGCCGGCATCACCGGCGCCACAGGTGC | |
| | GGTTGCTGGCGCCTATATCGCCGACATCACCGATGGGGAAGATCGGGCTCGCCACTTCG | |
| | GGCTCATGAGCAAATATTTTATCTGAGGTGCTTCCTCGCTCACTGACTCGCTGCACGAG | |
| | GCAGACCTCAGCGCTAGCGGAGTGTATACTGGCTTACTATGTTGGCACTGATGAGGGTG | |
| | TCAGTGAAGTGCTTCATGTGGCAGGAGAAAAAAGGCTGCACCGGTGCGTCAGCAGAATA | |
| | TGTGATACAGGATATATTCCGCTTCCTCGCTCACTGACTCGCTACGCTCGGTCGTTCGA | |
| | CTGCGGCGAGCGGAAATGGCTTACGAACGGGGCGGAGATTTCCTGGAAGATGCCAGGAA | |
| | GATACTTAACAGGGAAGTGAGAGGGCCGCGGCAAAGCCGTTTTTCCATAGGCTCCGCCC | |
| | CCCTGACAAGCATCACGAAATCTGACGCTCAAATCAGTGGTGGCGAAACCCGACAGGAC | |
| | TATAAAGATACCAGGCGTTTCCCCTGGCGGCTCCCTCGTGCGCTCTCCTGTTCCTGCCT | |
| | TTCGGTTTACCGGTGTCATTCCGCTGTTATGGCCGCGTTTGTCTCATTCCACGCCTGAC | |
| | ACTCAGTTCCGGGTAGGCAGTTCGCTCCAAGCTGGACTGTATGCACGAACCCCCCGTTC | |
| | AGTCCGACCGCTGCGCCTTATCCGGTAACTATCGTCTTGAGTCCAACCCGGAAAGACAT | |
| | GCAAAAGCACCACTGGCAGCAGCCACTGGTAATTGATTTAGAGGAGTTAGTCTTGAAGT | |
| | CATGCGCCGGTTAAGGCTAAACTGAAAGGACAAGTTTTGGTGACTGCGCTCCTCCAAGC | |
| | CAGTTACCTCGGTTCAAAGAGTTGGTAGCTCAGAGAACCTTCGAAAAACCGCCCTGCAA | |
| | GGCGGTTTTTTCGTTTTCAGAGCAAGAGATTACGCGCAGACCAAAACGATCTCAAGAAG | |
| | ATCATCTTATTAAGGGGTCTGACGCTCAGTGGAACGAAAAATCAATCTAAAGTATATAT | |
| | GAGTAAACTTGGTCTGACAGTTACCTTAGAAAAACTCATCGAGCATCAAATGAAACTGC | |
| | AATTTATTCATATCAGGATTATCAATACCATATTTTTGAAAAAGCCGTTTCTGTAATGA | |
| | AGGAGAAAACTCACCGAGGCAGTTCCATAGGATGGCAAGATCCTGGTATCGGTCTGCGA | |
| | TTCCGACTCGTCCAACATCAATACAACCTATTAATTTCCCCTCGTCAAAAATAAGGTTA | |
| | TCAAGTGAGAAATCACCATGAGTGACGACTGAATCCGGTGAGAATGGCAAAAGCTTATG | |
| | CATTTCTTTCCAGACTTGTTCAACAGGCCAGCCATTACGCTCGTCATCAAAATCACTCG | |
| | CATCAACCAAACCGTTATTCATTCGTGATTGCGCCTGAGCGAGACGAAATACGCGATCG | |
| | CTGTTAAAAGGACAATTACAAACAGGAATCGAATGCAACCGGCGCAGGAACACTGCCAG | |
| | CGCATCAACAATATTTTCACCTGAATCAGGATATTCTTCTAATACCTGGAATGCTGTTT | |
| | TCCCGGGGATCGCAGTGGTGAGTAACCATGCATCATCAGGAGTACGGATAAAATGCTTG | |
| | ATGGTCGGAAGAGGCATAAATTCCGTCAGCCAGTTTAGTCTGACCATCTCATCTGTAAC | |
| | ATCATTGGCAACGCTACCTTTGCCATGTTTCAGAAACAACTCTGGCGCATCGGGCTTCC | |
| | CATACAATCGATAGATTGTCGCACCTGATTGCCCGACATTATCGCGAGCCCATTTATAC | |
| | CCATATAAATCAGCATCCATGTTGGAATTTAATCGCGGCCTCGAGCAAGACGTTTCCCG | |
| | TTGAATATGGCTCAT | |
| Multi-Enzyme | CCTAGATCCTTTTAAATTAAAAATGAAGTTTTAAATCAATCTAAAGTATATATGAGTAA | 246 |
| Backbone^{b} | ACTTGGTCTGATTATTTGCCGACTACCTTGGTGATCTCGCCTTTCACGTAGTGGACAAA | |
| | TTCTTCCAACTGATCTGTGCGCGAGGCCAAGCGATCTTCTTCTTGTCCAAGATAAGCCT | |
| | GTCTAGCTTCAAGTATGACGGGCTGATACTGGGCCGGCAGGCGCTCCATTGCCCAGTCG | |
| | GCAGCGACATCCTTCGGCGCGATTTTGCCGGTTACTGCGCTGTACCAAATGCGGGACAA | |
| | CGTAAGCACTACATTTCGCTCATCGCCAGCCCAGTCGGGCGGCGAGTTCCATAGCGTTA | |
| | AGGTTTCATTTAGCGCCTCAAATAGATCCTGTTCAGGAACCGGATCAAAGAGTTCCTCC | |
| | GCCGCTGGACCTACCAAGGCAACGCTATGTTCTCTTGCTTTTGTCAGCAAGATAGCCAG | |
| | ATCAATGTCGATCGTGGCTGGCTCGAAGATACCTGCAAGAATGTCATTGCGCTGCCATT | |
| | CTCCAAATTGCAGTTCGCGCTTAGCTGGATAACGCCACGGAATGATGTCGTCGTGCACA | |
| | ACAATGGTGACTTCTACAGCGCGGAGAATCTCGCTCTCTCCAGGGGAAGCCGAAGTTTC | |
| | CAAAAGGTCGTTGATCAAAGCTCGCCGCGTTGTTTCATCAAGCCTTACGGTCACCGTAA | |
| | CCAGCAAATCAATATCACTGTGTGGCTTCAGGCCGCCATCCACTGCGGAGCCGTACAAA | |
| | TGTACGGCCAGCAACGTCGGTTCGAGATGGCGCTCGATGACGCCAACTACCTCTGATAG | |
| | TTGAGTCGATACTTCGGCGATCACCGCTTCCCTCATTTTAGCTTCCTTAGCTCCTGAAA | |
| | ATCTCGATAACTCAAAAAATACGCCCGGTAGTGATCTTATTTCATTATGGTGAAAGTTG | |
| | GAACCTCTTACGTGCCATTTCCCCGAAAAGTGCCACCTGACGTCTAAGAAACCATTATT | |
| | ATCATGACATTAACCTATAAAAATAGGCGTATCACGAGGCAGAATTTCAGATAAAAAAA | |
| | ATCCTTAGCTTTCGCTAAGGATGATTTCTGGAATTCGCGGCCGCTTCTAGAGCGCGAAG | |
| | ACTTACGAAAATCCGCTTAACGATCGTTGGCTGttttcagcaggacgcactgacctccc | |
| | tatcagtgatagagattgacatccctatcagtgatagagatactgagcacCAGGGTGTC | |
| | TCAAGGTGCGTACCTTGACTGATGAGTCCGAAAGGACGAAACACCCCTCTACAAATAAT | |
| | [chemical structure] | |
| | CTGCAAATACAACCACATTTCCATGTAGAGGTCATTGAACCAAAGCAAGTCTACTTGTT | |
| | GGGTGAACAAGCTAATCATGCATTGACAGGCCAATTATACTGCCAAATTTTGCCATTGT | |
| | TAAACGGACAATACACATTGGAACAAATCGTTGAAAAACTAGACGGAGAAGTACCACCT | |
| | GAATACATTGATTATGTGCTGGAGAGACTAGCTGAGAAGGGCTATCTGACTGAAGCAGC | |
| | ACCTGAATTATCTAGTGAAGTGGCCGCTTTCTGGTCTGAGCTGGGGATTGCACCTCCTG | |
| | TCGCGGCCGAAGCATTACGTCAACCTGTGACTTTAACACCTGTTGGAAACATCAGCGAA | |
| | GTAACAGTAGCAGCCTTAACCACAGCCCTACGTGATATCGGTATTTCCGTTCAAACACC | |
| | TACAGAAGCTGGATCGCCAACTGCATTGAACGTTGTACTTACCGATGATTATCTCCAAC | |
| | CAGAACTCGCTAAGATCAATAAGCAAGCCTTAGAAAGTCAACAAACTTGGCTACTTGTC | |
| | AAACCAGTTGGCTCCGTGTTATGGTTGGGTCCGGTATTCGTGCCAGGAAAAACAGGTTG | |
| | CTGGGATTGTTTGGCTCACAGATTAAGGGGGAATAGAGAGGTAGAGGCCTCTGTATTGA | |
| | GACAAAAACAAGCTCAACAACAACGTAATGGACAAAGCGGGTCTGTAATAGGATGCCTT | |
| | CCCACGGCTAGAGCGACACTGCCCTCAACACTCCAAACTGGGCTGCAGTTCGCTGCTAC | |
| | CGAAATTGCTAAATGGATAGTTAAGTATCATGTTAATGCCACAGCGCCTGGCACCGTAT | |
| | TCTTCCCTACATTGGATGGTAAGATAATTACGCTAAATCACTCCATACTGGATTTGAAG | |
| | TCACATATTCTGATCAAGCGTTCTCAATGTCCCACCTGTGGTGACCCAAAAATCTTACA | |
| | GCACCGTGGTTTCGAACCTTTAAAACTTGAGTCAAGGCCTAAACAGTTCACCTCAGACG | |
| | GCGGACATCGTGGTACTACCCCTGAACAAACTGTCCAGAAATATCAACATTTAATCTCG | |
| | CCTGTTACCGGTGTAGTTACTGAATTGGTCAGGATAACTGATCCGGCCAATCCACTAGT | |
| | TCACACATATAGAGCTGGTCATAGCTTCGGGAGCGCTACATCGCTGAGAGGGCTGCGTA | |
| | ATACCTTAAAGCATAAGAGTTCAGGTAAGGGTAAGACTGATTCTCAAAGTAAAGCCTCG | |
| | GGCCTGTGTGAGGCGGTAGAACGTTACTCAGGAATCTTTCAAGGTGACGAACCGAGAAA | |
| | ACGCGCCACATTGGCTGAATTGGGAGATTTGGCAATTCACCCTGAGCAATGCTTGTGTT | |
| | TTTCCGACGGTCAGTACGCTAATAGAGAAACTTTAAACGAACAGGCAACGGTGGCACAT | |
| | GATTGGATACCTCAACGTTTTGATGCATCACAAGCTATTGAATGGACTCCAGTCTGGTC | |
| | CCTAACTGAACAGACCCATAAATATTTGCCCACCGCATTGTGTTACTACCATTATCCTC | |
| | TACCCCCAGAACACAGATTCGCACGTGGAGATTCGAATGGTAATGCTGCCGGAAATACG | |
| | TTGGAAGAGGCTATACTCCAAGGCTTCATGGAATTAGTCGAGAGAGATGGTGTGGCTTT | |
| | ATGGTGGTATAACAGGCTACGCAGACCCGCTGTAGACTTAGGCTCATTTAACGAGCCAT | |
| | ACTTCGTTCAGTTGCAACAATTCTACAGAGAAAACGATAGAGATTTGTGGGTTTTGGAC | |
| | TTGACAGCTGATTTAGGTATCCCGGCTTTCGCGGGCGTTTCTAATAGAAAAACTGGTAG | |
| | TTCGGAGAGGTTGATATTAGGATTCGGTGCACACCTCGATCCTACTATTGCAATTCTGA | |
| | GAGCAGTTACAGAAGTTAACCAGATTGGCCTTGAATTAGATAAAGTTCCAGACGAGAAC | |
| | CTTAAGAGCGACGCAACAGATTGGCTAATTACTGAAAAATTAGCTGACCACCCTTATTT | |
| | GTTACCAGATACAACTCAACCTCTAAAAACTGCTCAAGATTATCCTAAAAGGTGGTCTG | |
| | ACGATATATACACGGACGTAATGACTTGCGTTAATATTGCTCAACAAGCAGGACTTGAA | |
| | ACTCTAGTTATTGATCAAACACGTCCGGACATTGGTTTGAATGTTGTTAAGGTGACAGT | |
| | CCCGGGGATGAGGCACTTTTGGTCAAGATTTGGAGAGGGGAGGCTTTATGACGTGCCCG | |
| | TCAAATTAGGTTGGCTTGACGAACCTTTGACCGAAGCGCAAATGAACCCCACGCCGATG | |
| | CCTTTTTAATAATGAAGAGCTAAGCGTTGAACGCTACACGGACTCTAACTAAAAAGGCC | |
| | TCCCAAATCGGGGGGCCTTTTTTATTGATAACAAAACGGCATGCGCATGGACGACTACG | |
| | GATGCGGGCAAGGTGCCGCTTAACGATCGTTGGCTGccctttgtgcgtccaaacggacg | |
| | cacggcgctctaaagcgggtcgcgatctttcagattcgctcctcgcgctttcagtcttt | |
| | gttttggcgcatgtcgttatcgcaaaaccgctgcacacttttgcgcgacatgctctgat | |
| | ccccctcatctgggggggcctatctgagggaatttccgatccggctcgcctgaaccatt | |
| | ctgctttccacgaacttgaaaacgctCAGTCATAAGTCTGGGCTAAGCCCACTGATGAG | |
| | TCGCTGAAATGCGACGAAACTTATGACCTCTACAAATAATTTTGTTTAAGAGCCACCAG | |
| | TTATAAGGAGAACCTACCGATGACCAAAAAGTATCGGCGTGTATCCTACGCAGTGTGGG | |
| | AAATCACCCTGAAATGCAATCTGGCATGCTCTCATTGTGGCAGCCGCGCCGGCCAAGCC | |
| | CGTACGAAAGAGCTGAGTACCGAAGAAGCGTTCAACCTGGTCCGCCAGCTGGCCGACGT | |
| | GGGCATTAAGGAAGTCACCCTGATCGGTGGTGAAGCCTTTATGCGTTCGGATTGGCTGG | |
| | AAATCGCGAAAGCCGTCACTGAAGCCGGCATGATCTGTGGCATGACCACAGGGGGCTTC | |
| | GGGGTCAGTCTGGAAACGGCGCGTAAAATGAAAGAAGCGGGCATTAAAACGGTGAGCGT | |
| | TAGCATTGACGGTGGTATTCCTGAAACCCACGACCGCCAGCGCGGTAAAAAGGGTGCGT | |
| | GGCATAGTGCATTCCGGACTATGAGCCATCTGAAAGAAGTCGGGATCTACTTCGGTTGC | |
| | AACACTCAAATCAATCGTTTATCGGCGTCAGAATTCCCGATTATCTATGAACGTATTCG | |
| | CGATGCTGGGGCACGTGCGTGGCAAATTCAGCTGACGGTTCCGATGGGCAACGCCGCGG | |
| | ATAACGCAGATATGCTGCTGCAACCGTATGAATTGCTCGACATCTATCCGATGTTAGCC | |
| | CGCGTTGCCAAACGTGCGAAACAGGAAGGCGTGCGTATTCAGGCAGGTAACAACATCGG | |
| | GTACTATGGACCGTATGAGCGTCTGCTGCGTGGCAGCGACGAATGGACGTTTTGGCAAG | |
| | GATGTGGTGCGGGCCTTAACACCCTCGGCATCGAAGCCGACGGCAAAATCAAAGGCTGT | |
| | CCATCCCTGCCGACCGCCGCGTACACCGGCGGTAACATTCGCGATCGCCCGCTGCGGGA | |
| | AATCGTCGAACAGACCGAAGAACTGAAATTTAACTTAAAAGCTGGTACAGAACAAGGTA | |
| | CGGACCATATGTGGGGCTTTTGTAAAACCTGCGAATTCGCGGAACTCTGTCGCGGCGGA | |
| | TGCAGCTGGACTGCGCATGTGTTCTTTGACCGGCGCGGCAATAATCCGTACTGCCACCA | |
| | TCGGGCTCTGAAACAAGCCCAAAAAGACATTCGCGAACGCTTTTATTTAAAAGTGAAAG | |
| | CAAAGGGCAACCCGTTCGACAATGGTGAATTTGTTATCATTGAAGAACCTTTTAACGCT | |
| | CCGTTACCCGAGAATGACCTGCTGCACTTTAACAGTGATCACATTCAATGGCCAGAAAA | |
| | CTGGCAAAATAGTGAAAGCGCGTACGCATTGGCCAAGTAATAAATATAAAGTTAAGGAG | |
| | TTGCACATGAACAGTAATCAGATCCCTAACAAAGTTGCAACCGCGGCACAGAAATCTGA | |
| | CGACAGCAGCAGCGTATTACCGCGCCAGGGGTGGCAAGACAAACAAGCCTTTATTAAGG | |
| | CACTCATTAAAGCCAAACAGTCTCTCGAAATTGCCGAAATTAGCAACTTTTTAACCTAA | |
| | TAAAGAATTACCTACCGCGGTCGCTCGGTACCAAATTTTCGAAAAAAGACGCTGAAAAG | |
| | CGTCTTTTTTCGTTTTGGTCCCACGTGGCAAGCGCTTAACGATCGTTGGCTGaacaaac | |
| | agacaatctggtctgtttgtattatggaaaatttttctgtataatagattcaacaaaca | |
| | gacaatctggtctgtttgtattatCAGCGGTCAACGCATGTGCTTTGCGTTCTGATGAG | |
| | ACAGTGATGTCGAAACCGCCTCTACAAATAATTTTGTTTAAGCTCTTCAAGAGCATTCC | |
| | ATAAGGAGAAATTTTATGACGAGAACCAACACCGGCTATCGTTATCGCGCGTTCGGCCT | |
| | GCGCATAGACTCAGATATTCCGCTGCCAGAATTAGGGGACGGTACGCGCCCTGATGGTG | |
| | ACGCGGATCTGACGGTCGTCCGGTGTGGGGAAGCGGAGCCGGAATGGGCTGAAGGTGGT | |
| | GGCGGGGGTCGTCTGTATGCCGCTGAAGGCATTGTATCTTTTCGCGTGCCGCAGACGGC | |
| | AGCGTTCCGTATTACTAATGGAAATCGCATCGAGGTGCATGCCTACTCGGGGGCTGATG | |
| | AGGATCGAATACGCCTGTACGTGTTAGGGACCTGTATGGGAGCGCTGTTACTGCAACGT | |
| | AGAATCTTACCGCTTCATGGTTCGGTCGTCGCCCGTGATGGTCGTGCGTATGCCATAGT | |
| | TGGCGAAAGCGGAGCGGGCAAATCCACGATGAGTGCAGCACTTCTCGAACGTGGATTCC | |
| | GCCTCGTTACGGATGACGTGGCCGCCATCGTGTTCGATGAGCGTGGGACCCCACTGGTT | |
| | ATGCCGGCTTATCCACAGCAAAAACTGTGGCAGGATTCCCTGGACCGTCTGCAAATTGC | |
| | GGGCTCGGGCCTTCGTCCGCTGTTCGAACGCGAAACGAAATACGCTGTACCCGCGGATG | |
| | GGGCATTCTGGCCCGAACCGGTTCCATTGGTGCACATTTACGAACTGGTTCATAGCGAT | |
| | GGTCAAACGCCTGAACTGCAGCCGATTGCCAAATTAGAGCGTTGCTATACCTTGTATCG | |
| | CCACACATTTCGTAGAAGCCTGATCGTCCCCAGCGGCTTAAGCGCCTGGCATTTTGAAA | |
| | CGGCAGTGAAACTTGCGGAGAAAACGGGGATGTACCGTCTTATGCGCCCGGCCAAAGTT | |
| | TTCGCGGCTCGCGAATCTGCTCGGCTGATTGAAACTCACGCCGATGGTGAAGTGTCACG | |
| | TTAATAATGAAGAGCGGATGAGCTCTACAAATAAGCAGAGGTGGTTGTGTTGCGAAAAA | |
| | AAAAAAAAAACACCCTAACGGGTGTTTTTTTTTTTTTGGTGTCCCCACGTGTGGCGCTT | |
| | TACAAAGTCTTCCTGTACTAGTAGCGGCCGCTGCAGTCCGGCAAAAAAGGGCAAGGTGT | |
| | CACCACCCTGCCCTTTTTCTTTAAAACCGAAAAGATTACTTCGCGTTATGCAGGCTTCC | |
| | TCGCTCACTGACTCGCTGCGCTCGGTCGTTCGGCTGCGGCGAGCGGTATCAGCTCACTC | |
| | AAAGGCGGTAATTTAATAAGATGATCTTCTTGAGATCGTTTTGGTCTGCGCGTAATCTC | |
| | TTGCTCTGAAAACGAAAAAACCGCCTTGCAGGGCGGTTTTTCGAAGGTTCTCTGAGCTA | |
| | CCAACTCTTTGAACCGAGGTAACTGGCTTGGAGGAGCGCAGTCACCAAAACTTGTCCTT | |
| | TCAGTTTAGCCTTAACCGGCGCATGACTTCAAGACTAACTCCTCTAAATCAATTACCAG | |
| | TGGCTGCTGCCAGTGGTGCTTTTGCATGTCTTTCCGGGTTGGACTCAAGACGATAGTTA | |
| | CCGGATAAGGCGCAGCGGTCGGACTGAACGGGGGGTTCGTGCATACAGTCCAGCTTGGA | |
| | GCGAACTGCCTACCCGGAACTGAGTGTCAGGCGTGGAATGAGACAAACGCGGCCATAAC | |
| | AGCGGAATGACACCGGTAAACCGAAAGGCAGGAACAGGAGAGCGCACGAGGGAGCCGCC | |
| | AGGGGGAAACGCCTGGTATCTTTATAGTCCTGTCGGGTTTCGCCACCACTGATTTGAGC | |
| | GTCAGATTTCGTGATGCTTGTCAGGGGGGCGGAGCCTATGGAAAAACGGCTTTGCCGCG | |
| | GCCCTCTCACTTCCCTGTTAAGTATCTTCCTGGCATCTTCCAGGAAATCTCCGCCCCGT | |
| | TCGTAAGCCATTTCCGCTCGCCGCAGTCGAACGACCGAGCGTAGCGAGTCAGTGAGCGA | |
| | GGAAGCGGAATATATCCTGTATCACATATTCTGCTGACGCACCGGTGCAGCCTTTTTTC | |
| | TCCTGCCACATGAAGCACTTCACTGACACCCTCATCAGTGCCAACATAGTAAGCCAGTA | |
| | TACACTCCGCTACGATTATCAAAAAGGATCTTCA | |

^{a}Text formatting correspond to sequence features/components: promoters (lowercase), [chemical structure]
terminators (UNDERLINED), and plasmid backbone and spacers (REGULAR ALL CAPS). Each backbone plasmid sequence except for the multi-enzyme backbone includes a coding sequence for GFP. The portion of the sequence that is double underlined can be replaced with a peptide coding sequence or an RBS + enzyme coding sequence, for example chosen from Table 9, to generate a plasmid encoding a sequence of interest (e.g., a peptide or enzyme).
^{b}The multi-enzyme backbone shown is the sequence of the 6048 plasmid. To generate an alternative multi-enzyme plasmid, the protein coding sequences (shown in bold) can be replaced with coding sequences for alternative enzymes (e.g., one chosen from Table 9)

TABLE 17
Enzyme and peptide amino acid sequences

| | SEQ | |
|---|---|---|
| | ID | |
| Name | NO | Sequence |
| AlbA | 247 | MFIEQMFPFINESVRVHQLPEGGVLEIDYLRDNVSISDFEYLDLNKTAYELCMRMDGQKTA |
| enzyme | | EQILAEQCAVYDESPEDHKDWYYDMLNMLQNKQVIQLGNRASRHTITTSGSNEFPMPLHAT |
| | | FELTHRCNLKCAHCYLESSPEALGTVSIEQFKKTADMLFDNGVLTCEITGGEIFVHPNANE |
| | | ILDYVCKKFKKVAVLTNGTLMRKESLELLKTYKQKIIVGISLDSVNSEVHDSFRGRKGSFA |
| | | QTCKTIKLLSDHGIFVRVAMSVFEKNMWEIHDMAQKVRDLGAKAFSYNWVDDFGRGRDIVH |
| | | PTKDAEQHRKFMEYEQHVIDEFKDLIPIIPYERKRAANCGAGWKSIVISPFGEVRPCALFP |
| | | KEFSLGNIFHDSYESIFNSPLVHKLWQAQAPRFSEHCMKDKCPFSGYCGGCYLKGLNSNKY |
| | | HRKNICSWAKNEQLEDVVQLI |
| AlbsA | 248 | MDSLLSTETVISDDELLPIEVGGTAELTEGQGGGQSEDKRRAYNC |
| AlbsB | 249 | MPELPRFATAPRHVRALDFGHVLVLIDYRSNHVQCLLPAAAAHWTATARTGRLDTMPAALA |
| enzyme | | TQLLTSALLVPRPTATPWTAPVAAPPAPPSWGGSEHPAGTSRPRARHRHSTTAAAALACVL |
| | | AIKAAGPTRYAMQRLTTVVKAAASTCRRPATPAQATAAALAVRQACWYSPARTACLEESAA |
| | | TVILLATRRLSSTWCHGVAPDPIRLHAWVETEDGTPVAEPASTLAYTPALTIGGHHQHQP |
| AlbsC | 250 | MIFGGFSTTREVRQRPGNAEFIATDSPIWRLGRSPARCVAADHGQRRLVVLGECGATDGEL |
| enzyme | | SRLATAGLPTDITWRWPGVYVVVEEQPERTVLHTDPAAALPVYATPWQGGWAWSTSARILA |
| | | RLTEAPIDGQRLACSVLAPSVPALSGTRTFFAGIEQLALGSRIELPVDGSRLRVTVRWRPD |
| | | PVPGEPYHRLRTALTEAVALRVNRAPDLSCDLSGGLDSTSLAVLAAVCLPESHHLNAITIH |
| | | PEGDESGADLRYARLAAAHHGRIRHHLLPLAAEHLPYTEITAVPPTTEPAPSTLTRARLAW |
| | | QLDWMRQHLGSRTHMTGDGGDSVLFQPPAHLADLLRHRQWRRTLSESLGWARLRHTSVLPL |
| | | LRGAATLARTSRRSGLQDLARALAGAGQQGDGRGNVSWFAPLPLPGWATPTARRLLLDAAD |
| | | EAISTADPLPGLDTSLRVLIDEIREVARTAAADAELADAHGTTLHNPFLDPRTIDAVLRTP |
| | | IAHRPAVHSYKPALGHAMQDLLPGAVARRSTKGSFNADHYAGMRANLPALTALADGHLADL |
| | | GLLEPTRFRSHLRQAAAGIPMPLAAIEQALSAEAWCHAHHATPSPAWTTQPPEHPHA |
| AlbsT | 251 | MSTSPEQTLWISTDTCGLGPYRADLVDTYWQWEQDPTLLVGYGRQSPQSLEARTEGMAHQL |
| enzyme | | RGDNIRFTIYDLCSSTPTPAGVATLLPDHSVRTAEYVIMLAPEARGRGLGTTATQLTLDYA |
| | | FHITNLRMVWLKVLAPNTAGIRAYEKAGFRTVGALREAGYWLGKVCDEVLMDALAKDFTGP |
| | | SAVHAALTGASGRQLRRAP |
| AMdnA | 252 | MPENRQEDLNAQAVPFFARFLEGQNCEDLTDEESEAVSGGKRGQTRKYPSDCEDGNGVTGK |
| | | LRDEDIAVTLKYPSDNEDNGGGEIVTLKFPSDDDDQPVG |
| AMdnC | 253 | MNVLIITHSHDNESISLVTQAIESQGGKAFRFDTDRFPTEVQLDIYYSNTEKCVLVADDQK |
| enzyme | | LDLNEVTAVWYRRIAIGGKIPPTMDKQLRQASIQESRATIQGMIASIRGFHLDPVPNIRRA |
| | | ENKQLQLQVARKIGLDTPRTLTTNNPQAVKEFAAECQQDVITKMLSSFAIYDEKGGEQVVF |
| | | TNPVKSEDLENLEGLRFCPMTFQEKIAKVLELRITIVGKSILTAAVNSQALDKSRYDWRKQ |
| | | GVALLDAWQTHTLPQDVADKLLQLMAHFGLNYGAIDVILTPDNRYVFLEVNPVGEFFWLER |
| | | CPGLPISQAIAKVLLSHI |
| AtxA1 | 254 | MHTPIISETVQPKTAGLIVLGKASAETRGLSQGVEPDIGQTYFEESRINQD |
| AtxB | 255 | MYELNDGVGLALVDQHPIFLDLKTDRYLSLSPDGAAVLLGAAPATKESPLFLGLESIGLVK |
| enzyme | | NGPSGLKPCQIAVATGSAPPRKVQFESLSLLLLRLIRARLDQRALLKRVTDLKKAGTIAQT |
| | | KNRDCALSLLGSVETEAKACRTLLSSTDKCLPDAFAIATHLRRRGVDAKLVFGVRLPFAAH |
| | | AWVQVDDIVVGDRPDRILAFTPILVV |
| AtxC | 256 | MRYVASFFVRGHVSTPALRHPEPKGFAYAKVSGGLSVWSDAPIRHRAPLITVGAVFDRASF |
| enzyme | | KGLDCDLSGLRQDGLNTLKAETFGPYLALEVADNGTLRVYRDPSGGAPCYYLQTEDGFWLA |
| | | SDADLLFTHSGVHPSVSLPGLIEHLRRPEFQNEGTCLNVKQVRPGEQVDLSLSGEVRACLF |
| | | PPASSLRPPELHRAYDDIKAELRALILRSIKAYASDFPHVVVSFSGGLDSSVVAAGLAQTS |
| | | TKVLLHTFKGPDAKGDETAFAAECAAYLGLSLEIDTLSIDDVDLSATISPHLPRPSTSFFL |
| | | PSLLRGFSTSSQTRTGGAIFSGNGGDSVFCFMHSATPLADLMCRPSGLTPFMQTWADVQKL |
| | | TRASATEVLRRALKTAMARGYIWPESNLLLSRDTSSSRLTPDSVLSSLEGILPGRLRHLAL |
| | | IRRAHNTFEPFAPWRTPPVVHPLMAKPIQAFCLSLPSWMWVSGGKDRSLVRDAFEGLLPDS |
| | | VRLRKSKGSPAGFLHALYRAKGRQMIERIRHGYLRREGIIDISTGPDALFSEGFRNPRVMH |
| | | RFFELAATEVWIDHWRNWRRPRT |
| BamA | 257 | LKIRKVKIVRAQNGHYTN |
| BamB | 258 | MEGLYQLKVHSRIHKLQNNIAIGSMPPHALIIEDAPEYLSNVLRFFSSKKTIKEAEVYLSD |
| enzyme | | NTNLSSNEINLLLGDLIENEIIVKQNYDSNNRYSRHSLYYEMIDANAENAQKILAEKTVGL |
| | | VGMGGIGSNVAMNLAAAGVGKLIFSDGDTIELSNLTRQYLYKEDQVGLSKVESAKEQLQLL |
| | | NSEVELIPVCESISGEELFDNHFSECDFVVLSADSPFFVHEWINNAALKYGFSYSNAGYIE |
| | | TYGAIGPLVIPGETACYECYKDKGDLYLYSDNKEEFSVNLNESFQAPSYGPLNAMVSSIQA |
| | | NEVIRHLLGLKTKTSGKRLLINSEIYKIHEENFEKKNNCLCSDIKGEKLSKNTLNSDKELH |
| | | EVYIEERESDSFNSILLDKTMSKLVKINKEETKILDIGCATGEQALYFANKGAKVTAVDIS |
| | | DDMLKVLDKKASNINAGSIKTMRGNIESIEVNDTFNYIVCNNILDYLPEIDRTLRKLNMFL |
| | | KNDGTLIVTIPHPVKDGGGWRKDYYNGKWNYEEFILKDYFNEGLIEKSREDKNGETVIKSI |
| | | KTYHRTTETYFNSFTDAGFKVVSLLEPQPLSTVSETHPILFEKCSRIPYFQVFVLKKEDRH |
| | | AI |
| BmbC | 259 | MGPVVVFDCMTADFLNDDPNNAELSALEMEELESWGAWDGEATS |
| BsjA2 | 260 | MTNEEIIVAWKNPKVRGKNMPSHPSGVGFQELSINEMAQVTGGAVEQRATPTLATPLTPHT |
| | | PYATYVVSGGVVSAISGIFSNNKTCLG |
| BsjA3 | 261 | MTNEEIIVAWKNPKVRGKNMPSHPSGVGFQELSINEMAQVTGGAVEQRATPATPATPWLIK |
| | | ASYVVSGAGVSFVASYITVN |
| BsjM | 262 | MIKNVNLKEAIKGLTVSERYDTLKNSGVNLNLNISALEEWRNRKNLLADEDFTEMLTVLEY |
| enzyme | | DPVYFSHAINENIEEHIDIYKSKILGENWFIVLNDILDELDNPIEYKKEMNHSYLLRPFLL |
| | | YAEKEMNKYIVNRKELLPVEPQVIQQIMENLASKLFAVSVKSFVLELNISKLKDELAGETP |
| | | DERFHSFIRLMGEKTRLVDFYNEYIVLSRILVNITILFVNNIIELFERLQESKLDIVKKLG |
| | | VQEEFKISNISIGEGDTHQQGRSVIVLTFVSGKKVVYKPKNLKVVSAYNSLIDWINNKNNI |
| | | LKMPSYNTLIYDDFVIEEFVEKRDCKSIEEVKKYYIRYGQILGIMYILNGNDFHMENLIAS |
| | | GEYPIIVDLETLLQNIINFKNKPSADLITTKKMLNLVNSTLLLPEKLLKGDITDEGIDMSA |
| | | LAGKEQHLERREYQLKNLFTDNMVFDLEKVKIEGANNIPKLNGENVDYSTYIDEIVVGFEN |
| | | ICNLFIQYRDELLHSGILEEFKDVKVRHVLRNTVVYAKMLANTYHPDYLRDSLNREQVLEN |
| | | IWVHPFERKEFIKSEMEDILNNDIPIFFSYASSKDIIDSNGKLHKNVMEISGYERFTTKLK |
| | | ELNPFLIEQQVSVINIKTGRYGDKKFEKNYSVRDVATEKKDNPIDFLQEAMNIGDKILEHA |
| | | IICDETKTISWLTINNHHDKNWEIGPISGEFYDGLAGISLFYHYLYKKSHNVEYKKIRDYA |
| | | FNMAKVKALSLKYDSGLTGYASLLYTAHKIVQDEPRKQYKDVINEVFKYIDESKVVTAKYN |
| | | WLHGTASIIHVLLNLYEDSRDMAYLTKCIQYGKYLVKQIKEHKDMLAPGFSQGISSVIMVL |
| | | VRLSKKCEVEEFLELALELMEMERNKLGNLSESNWLNGLVGIGLSRIKLKGLDSNLQVDND |
| | | IELVLDGVMNSLYSKDDTLSCGNSGTVELFLSLFEQTKKKEYLDMAKAICGKMIEESRISF |
| | | EYQTKSLPGLELVGLYSGLAGIGYQFLRISDVEDIASIATLD |
| CapA | 263 | MVRFLAKLLRSTIHGSNGVSLDAVSSTHGTPGFQTPDARVISRFGFN |
| CapB | 264 | MQPDLEVVDVRRGESFKAWSHGYPYRTVRWHFHPEFEVHLIVETTGQMFVGDYVGGFGPGN |
| enzyme | | LVLMGPNLPHNWVSDVPEGKTVAERNLVVQFGQAFVSRCEDSLTEWRHVETLLADARRGVQ |
| | | FGPRTSEAIKPLFAELIHARGLRRIVLFLSMLQILVDATDRELLASPAYQADPSTFASTRI |
| | | NHALAYIGKNLANELRETDLARLAGQSVSAFSHYFRRHTGLPFVQYVNRMRINLACQLLMD |
| | | GDASVTDICFRSGFNNLSNFNRQFLAVKGMSPSRFRRYQALNDASRDASEAAAKRGAGIAG |
| | | APAIVPAAQARGEARPIPEVLLSG |
| CapC | 265 | MMLTASSTPASGNPAARALRAAAFALALGGACVAHAAPLRIGMTFQELNNPYFVTMQKALN |
| enzyme | | EAAASIGAQVIVTDAHHDVSKQVSDVEDMLQKKIDILLVNPTDSTGIQSAIVSAKKAGAVV |
| | | VAVDANANGPVDSFVGSKNFDAGAMSCEYLAKAINGGGEVAILDGIPVVPILERVRGCRAA |
| | | LAKFPNVKIVDVQNGKQERATALTVTENMIQAHPKLKGVFSVNDGGSMGALSAIEASGKDI |
| | | RLTSVDGAPEAVAAIQKPNSKFIETSAQFPRDQIRLAIGIGLAKKWGANVPKAIPVDVKLI |
| | | DKGNAKTFSW |
| CinA | 266 | MTASILQSVVDADFRAALIENPAAFGASTAVLPTPVEQQDQASLDFWTKDIAATEAFACKQ |
| | | SGSFGPFTFVCDGNTK |
| CinX | 267 | MALKTCEEFLRDALDPDRFGREMKAVTEIPEIVKLGHRHGYGFTAEEFLTKAMSFGAPPAG |
| enzyme | | AAAPGESASVPGQNGSSPGHAARAAMAGPEAGATSFAHYEYRLDELPEFAPVVAELPKLKV |
| | | MPPSVGPDRFAARYRDEDMRTISMSPADPAYQAWHQELAGRGWRDAEDTAAAPDAPRRDFH |
| | | LLNLDEHVDYPGYEEYFAAKTRVVAALENLFGGDVRCSGSMWYPPSSYRLWHTNADQPGWR |
| | | MYLVDVDRPFADPDRTSFFRYLHPRTREIVTLRESPRIVRFFKVEQDPEKLFWHCIANPTD |
| | | RHRWSFGYVVPENWMDALRHHG |
| Cln1A1 | 268 | MTPIQSKFCLLRVGSAKRLTQSFDVGTIKEGLVSQYYFA |
| Cln1A2 | 269 | MTQVSPSPLRLIRVGRALDLTRSIGDSGLRESMSSQTYWP |
| Cln1B | 270 | MPLWLAQDVHAVALDEDIVVLDAVSDAYLCLVGASALISLGSERSVSADPVAAETLREAGL |
| enzyme | | VGPHPSGATRPIPPKPTIDLPDAARQAQGRELRAAAWAGAATAIDFRRRSFRQLLARAGQR |
| | | PPGQAAAPADEVLAAAAVFMRLRPWSPVGGACLMRSYYLLRHLRILGFDADWIIGVRTWPF |
| | | MAHCWLQVGAVALDDDVERLTAYTPILAV |
| Cln1C | 271 | MGDYLALYWPRGMPGVAADAMRAAIEAEGAWTLAFEAYQLVVYVKGPRAPKVRALPDQGGV |
| enzyme | | VIGELFDTAATREGRVQDFPIALIKDVAAQDAARILATHAWGRYVAVLKAGDRPPWIFRDP |
| | | SGAVECLAWVRDEVTIISSDVAAQRAWSPDRLAIDWSGLGRVLARGNLWGEICPLAGVTAI |
| | | APGTARCDLGDAALSLWRPGDHARRSRHDVSPRDLARVVDASVAALARDRSAILVEISGGL |
| | | DSAIVATSLARGGAPVVAGINHYWPEPEGDERRWAQDIADRCGFRLIAGQRQRLLLDEAKL |
| | | LRHAQGPRPGLNAQDPDLDHDLAEQAKALGADALFSGQGGDGVFYQMANAALAADILMGKP |
| | | APMGRAASLAAVARRARATVWSLCGQAMFPSRAFAAGMPPPSFLSAGLAPPPVHPWIADQR |
| | | GVSPAKRIQIRGLTNIQCAFGDSLRGRAADLLYPLMAQPVMELCLSIPAPLLAVGALDRPF |
| | | ARAAFADRLPPRSLVRRSKGDVTVFFSKSLAASLPALRPFLLDGRLAEQGLIDRAKLEPLL |
| | | HPEPMIWRDSVGEVMLAAYLEAWVRAWEAKLRVS |
| Cln2A1 | 272 | MNTLKTRLIRFGSAKRLTRAGTGVLLPETNQIKRYDPA |
| Cln2A2 | 273 | MTTPKFRLIRLGSAKRLTRSGIGDVFPEPNMVRRWD |
| Cln2B | 274 | MTLTWRPGVHAVMVEDDLVLLDEAADAYVCLLDGAKVVSVRADGALSFNPPHAAEDMIAGG |
| enzyme | | LVEPSSSAAASANPPAKLPCTPLARLSRPRHVKVRPAEAALFLIQAWGVARAVRRWPMARL |
| | | LEALRGDRAAEPAKGRRSMAEACAVFDALLAWSPFDGECLFRSVLRRRFLMALGHSPDLVI |
| | | GVRTWPFRAHCWLQSGVDALDDWPERLCAYRPILAASASQGR |
| Cln2C | 275 | MSYLLMTWPPGQPSVEADALHAAFNGQGGWSLVLERFCLRVYVRGAAAPAVTLTPKGGVLI |
| enzyme | | GEMFDRAATETGAVAAYDLSRLGDDDGMAVARRVVDEAWGRYVLVLPVKERRPVVLREPLG |
| | | ALDALIWRKGDVWCVGADVPPGLEPKDLGVEETRLTHLIAEPDLASASLPLTGVAAVMPGT |
| | | AVDETGQVHRLWTPARFARSPRTDAWTAAERIPLVTRACIAALSANRSGILCEISGGLDSA |
| | | IVATSLKAEGAKISSGINFHWPQAEADERPYARAVAKSVRTRLQVVASRVAPVDPETFDEI |
| | | VVARPSFNAIDPVYDTVLAQRLIQGGEGALFTGQGGDAVFYQMPAPQLSLDLLARGPRRRG |
| | | LMGLSRRTNRSVWSLLRMGLRAPVRATFPYGARGADRPPMHPWLEDARGVGAAKRIQIEAL |
| | | VANQAVFEASRRGAAAHLVHPLLSQPLVELCLSTPAAVLAGAEQDRAFVRSAFRAQLPRLV |
| | | LDRQSKGDLSVFFAKGVARSLPGLRPRLLEGRLAARGLIDVEALSQAMQPEAMIWRDGSAE |
| | | ILCLAVLESWLRSWEARGA |
| Cln3A1 | 276 | MQRIIDETTDGLIELGAASVQTQGDVLFAPEPGVGRPPMGLSED |
| Cln3A2 | 277 | MERIEDHIDDELIDLGAASVETQGDVLNAPEPGIGREPTGLSRD |
| Cln3A3 | 278 | MEFEGIPSPDARIDLGLASEETCGQIYDHPEVGIGAYGCEGLQR |
| Cln3B | 279 | MRVAVPDHLAYCVKQGGVTFLDVRGDRYFGLPPVLEHAFVAIAEADFLLKEPNSLLEPLEA |
| enzyme | | LGVLVRGQARRADLTIPSANLSWVDEVSPTPPRLDPASLVATVTSVIRTRLSQKSKSLQAL |
| | | LEEVRTRRPGSPAHNWQLMRRLTAGFRASRAWAPIEPICLLDSLALLDFLHRRGLYPHIVF |
| | | GVIRQPFAAHCWVQADDVVLNDRLDHVGEYTPILVV |
| Cln3C | 280 | MEDYVVLIWPALAEAPARDLIRRLPKLKTVIETSGLVVLRPENGAGLRVGGNGVVLGSVFR |
| enzyme | | TGGDRETVAEFSESEASAIATSRGQQLVTEFWGGYLAVLGDASRSEVMVLRDPSGAMPAYC |
| | | LVHGEVQIICSRLEVLEDAGLGQQALNWDVVAQLLAFPNLRGRSTGLKGVEELLPGCRLTF |
| | | TGGLKTETLTWNPWLFARPSAQAPERGVAATAVRQAVEVSVRKWADQSSPVLLELSGGLDS |
| | | SIIACCLDEPRTAATFVNFVTPTAEGDERGYARLVAKAADKQLIEQDIRADEVDVTRPRPG |
| | | RHPRPASQALLQPLEQACAELAPQLGARSFFSGLGGDNVFCSIATASPAADALLTSGLGRQ |
| | | FWAAIGDLCARHNCTVWAALSATLKKLLRSDRRLVIKPNLDFLSFREDAIDRPDHPWLEVA |
| | | ADRLPGKREHVASILLAQGFLDRYEHAQVAAVRFPLLTQPVMEACLRVPTWMANHQGRNRA |
| | | VARDAFFDRLPPRVRDRQTKGGLNAFMGVAFERNRQALARHLLDGRLVQRGLIDAVAIKSA |
| | | LASPVLEGGAMNRLLYLADVESWVRSWEDV |
| ComQ | 281 | MKEIVKQNISNKDLSQLLCSFIDSKETFSFAESAILHYVVFGGENLDVATWLGAGIEILIL |
| enzyme | | SSDIMDDLEDEDNHHALWMKINRSESLNAALSLYTVGLTSIYSLNTNPLIFKYVLRYVNEA |
| | | MQGQHDDITNKSKTEDESLEVIRLKCGSLIALANVAGVLLATGEYNETVERYSYYKGIVAQ |
| | | ISGDYHVLLSGNRSDIEKNKQTLIYLYLKRLFNNASEELLYLFSHKDLYYKALLDREKFEE |
| | | KLIQAGVTQYISVLLEIYKQKCFSTIEQLNLDKEKKELIKESLLSYKKGDTRCKT |
| ComX | 282 | MQDLINYFLNYPEALKKLKNKEACLIGFDVQETETIIKAYNDYYRADPITRQWGD |
| CrnA1 | 283 | MSELSMEKVVGETFEDLSIAEMTMVQGSGDINGEFTTSPACVYSVMVVSKASSAKCAAGAS |
| | | AVSGAILSAIRC |
| CrnA2 | 284 | MSESNMKKVVGETFEDLSIAEMTKVQGSGDVMPESTPICAGFATLMSSIGLVKTIKGNVKS |
| | | FSVLI |
| CrnM | 285 | MNDINKNKTKTINEKIKIFTKEEVIDISYFEEWRSVRTLLNENYFKIMLEEMNISKNQFSY |
| enzyme | | ALQPLNDEFKLHTNVKNEEWIKCFNRVINNFNYKNINYKVGLYLPIQPFSVYLQEKLKEIL |
| | | KKLNNIKINDKIIDAFIEAHLIEMFDLVGKVIALKFEDYKQINFLKNTNNGTRLEEFLRST |
| | | FYSRKSFLKLFNEFPVLARVCTVRTIYLINNFSAIIQNINSDYLEIQEFLNVDFLNLTNIT |
| | | LSTGDSHEQGKSVSILYFDEKKLIYKPKNLKISEIFESFIDWYTNVSNHKLLDLKIPKGIF |
| | | KDDYTYNEFIEPNYCENKREIENYYNRYGYLIAICYLFNLNDLHVENVIAHGEYPVIVDIE |
| | | TSFQVPVQMEDDTLYVKLLRELELESVSSSFLLPTNLSFGMDDKVDLSALSGTMVELNQQI |
| | | LAPVNINMDNFHYEKSPSYFPGGNNIPKNNKSVTVDYKKYLLNIVTGFDEFMKYTQENQLE |
| | | FIEFLKKFSDKKIRVLVKGTEKYASMIRYSNHPNYNKEMKYRERLMMNLWAYPYKDKRIVN |
| | | SEVQDLLFNDIPIFYSFPNSRDLIDSRGLVYKDYLPVTGLQKAIDRVKDTSVKSLFDQKLI |
| | | LQSSLGLWDEILNKPVQKKELLFEKQNFNYVKEAINIAELLIGYLIETDDQSTMLSIDCSE |
| | | DKHWKIVPLDESLYGGLSGIALFFLDIYKITKDEKYFNYYDKIISTAIKQCKATIFSSSFT |
| | | GWLSPIYPLILEKKYFGTMKDKKFFDYTMEKLSNMTEEQINNMDGMDYISGKAGIVKLLIS |
| | | AYRESKNNENIGLALSKFSNDLIQNIGTGKVSELQNVGLAHGISGIMVVVASLDTFKSEYI |
| | | REQLAIEYEMFCLREDSYKWCWGISGMIQARLEILKLSPECVDKKELNLLIKRFKNILNQM |
| | | INEDSLCHGNGSIITTMKMIYMYTQDTEWNSLINLWLSNVSIYSTLQGYSIPKLGDVTIKG |
| | | LFDGICGIGWLYLYSNFSIENVLLLEV |
| CsegA1 | 286 | MTKKNATQAPRLVRVGDAHRLTQGAFVGQPEAVNPLGREIQG |
| CsegA2 | 287 | MTKTHRLIRLGDAQRLTQGTLTPGLPEDFLPGHYMPG |
| CsegA3 | 288 | MTSRFQLLRLGKADRLTRGALVGLLIEDITVARYDPM |
| CsegB | 289 | MDLWLSAGVYAVMIDDDVVFLDVATNAYFCLPAVGSVLALEGRSLRVAARELAEDLIQAGL |
| enzyme | | ASAAAAIEPPPSTRAPVRTARAVLEALPARERPRPRLAHWRQAIMAGLASRAAERRPFAQR |
| | | LPPPSTGVSPPASEGLLADLDAFRRLQPWLPFDGACLFRSQMLRDYLLALGHRVDWIFGVR |
| | | TWPFGAHCWLQAGDLVLDDEAERLIAYHPIMVR |
| CsegC | 290 | MGYAALTYPGGLAAAAFDEMVEALIDAGWTLALRAFRLAVLTDGQAPAVSPLMGRGGVAGV |
| enzyme | | LIGEAFDRRATLGGAVARAALDGLADIDPLEAGRHLIETAWGGYVGMWIGRAEAGPTLLRD |
| | | PSGALEALAWRRDGVTVMSARPLTGRAGPADLAIDWPRIVQILADPISAALGPPPLTGLAT |
| | | IDPGAAVHGADGQERSVLWTPAAVVRGARHRPWPSRQDLRRTIDATVAALASDAGPIVCEI |
| | | SGGLDSAIVATSLAASGLGPQLTVNFYGDQPEADERGYAQAVAERIGAPLRTLRREPFAFD |
| | | ETVLAAAGQAARPNFNALDPGYDAGLVGALEAIDARALFTGHGGDTVFYQVAASALAADLL |
| | | GGAPCEGSRRARLEEVARRTRRSIWSLAWEAFSGRPSTVSIEGQLLRQEAERIRRVGLTHP |
| | | WVGGLSSVTPAKRQQIRALVSNLNAHGATGRAERARIVHPLLAQPVVEACLAIPAPILSAG |
| | | EGERSFAREAFADRLPPSIVGRRSKGEISVFLNRSLAASAPFLRGFLLEGRLAARGLIDRD |
| | | ELAAALEPEAIVWKDASRDLLTAAALEAWVRHWEARIGEGEAAEGERAAGRGTAATGPRTS |
| | | ARKANTR |
| EpiA | 291 | EAVKEKNDLFNLDVKVNAKESNDSGAEPRIASKFICTPGCAKTGSFNSYCC |
| EpiD | 292 | MHGKLLICATASINVININHYIVELKQHFDEVNILFSPSSKNFINTDVLKLFCDNLYDEIK |
| enzyme | | DPLLNHINIVENHEYILVLPASANTINKIANGICDNLLTTVCLTGYQKLFIFPNMNIRMWG |
| | | NPFLQKNIDLLKSNDVKVYSPDMNKSFEISSGRYKNNITMPNIENVLNFVLNNEKRPLD |
| HalA1 | 293 | MTNLLKEWKMPLERTHNNSNPAGDIFQELEDQDILAGVNGAENLYFQGCAWYNISCRLGNK |
| | | GAYCTLTVECMPSCN |
| HalA2 | 294 | MVNSKDLRNPEFRKAQGLQFVDEVNEKELSSLAGSENLYFQGTTWPCATVGVSVALCPTTK |
| | | CTSQC |
| HalM1 | 295 | MRELQNALYFSEVVFGPNLEKIVGEKRLNFWLKLIGEDPENLKEFLSRKGNSFEEQTLPEK |
| enzyme | | EAIVPNRLGEEALEKVREELEFLNTYSTKHVRRVKELGVQIPFEGILLPFISMYIEKFQQQ |
| | | QLRKKIGPIHEEIWTQIVQDITSKLNAILHRTLILELNVARVTSQLKGDTPEERFAYYSKT |
| | | YLGKREVTHRLYSEYPVVLRLLFTTISHHISFITEILERVANDREAIETEFSPCSPIGTLA |
| | | SLHLNSGDAHHKQRTVTILEFSSSLKLVYKPRSLKVDGVFNGLLAFLNDRTGEVIKDQYCP |
| | | KVLQRDGYGYVEFVTHQSCQSLEEVSDFYERLGSLMSLSYVLNSSDFHFENIIAHGPYPVL |
| | | IDLETIIHNTADSSEETSTAMDRAFRMLNDSVLSTGMLPSSIYYRDQPNMKGLNVGGVSKS |
| | | EGQKTPFKVNQIANRNTDEMRIEKDHVTLSSQKNLPIFQSAAMESVHFLDQIQKGFTSMYQ |
| | | WIEKNKQEFKEQVRKFEGVPVRAVLRSTTRYTELLKSSYHPDLLRSALDREVLLNRLTVDS |
| | | VMTPYLKEIIPLEVEDLLNGDVPYFYTLPEERALYQEASAINSTFFTTSIFHKIDQKIDKL |
| | | GIEDHTQQMKILHMSMLASNANHYADVADLDIQKGHTIKNEQYVEMAKDIGDYLMELSVEG |
| | | ENQGEPDLCWISTVLEGSSEIIWDISPVGEDLYNGSAGVALFYAYLFKITGEKRYQEIAYK |
| | | ALVPVRRSVAQFQHHPNWSIGAFNGASGYLYAMGTIAALFNDERLKHEVTRSIPHIEPMIH |
| | | EDKIYDFIGGSAGALKVFLSLSGLFDEPKFLELAIACSEHLMKNAIKTDQGIGWKPPWEVT |
| | | PLTGFSHGVSGVMASFIELYQQTGDERLLSYIDQSLAYERSFFSEQEENWLTPNKETPVVA |
| | | WCHGAPGILVSRLLLKKCGYLDEKVEKEIEVALSTTIRKGLGNNRSLCHGDFGQLEILRFA |
| | | AEVLGDSYLQEVVNNLSGELYNLFKTEGYQSGTSRGTESVGLMVGLSGFGYGLLSAAYPSA |
| | | VPSILTLDGEIQKYREPHEA |
| HalM2 | 296 | MKTPLTSEHPSVPTTLPHTNDTDWLEQLHDILSIPVTEEIQKYFHAENDLFSFFYTPFLQF |
| enzyme | | TYQSMSDYFMTFKTDMALIERQSLLQSTLTAVHHRLFHLTHRTLISEMHIDKLTVGLNGST |
| | | PHERYMDFNHKFNKTSKSKNLFNIYPILGKLVVNETLRTINFVKKIIQHYMKDYLLLSDFF |
| | | KEKDLRLTNLQLGVGDTHVNGQCVTILTFASGQKVVYKPRSLSIDKQFGEFIEWVNSKGFQ |
| | | PSLRIPIAIDRQTYGWYEFIPHQEATSEDEIERYYSRIGGYLAIAYLFGATDLHLDNLIAC |
| | | GEHPMLIDLETLFTNDLDCYDSAFPFPALARELTQSVFGTLMLPITIASGKLLDIDLSAVG |
| | | GGKGVQSEKIKTWVIVNQKTDEMKLVEQPYVTESSQNKPTVNGKEANIGNYIPHVTDGFRK |
| | | MYRLFLNEIDELMDHNGPIFAFESCQIRHVFRATHVYAKFLEASTHPDYLQEPTRRNKLFE |
| | | SFWNITSLMAPFKKIVPHEIAELENHDIPYFVLTCGGTIVKDGYGRDIADLFQSSCIERVT |
| | | HRLQQLGSEDEARQIRYIKSSLATLTNGDWTPSHEKTPMSPASADREDGYFLREAQAIGDD |
| | | ILAQLIWEDDRHAAYLIGVSVGMNEAVTVSPLTPGIYDGTLGIVLFFDQLAQQTGETHYRH |
| | | AADALLEGMFKQLKPELMPSSAYFGLGSLFYGLMVLGLQRSDSHIIQKAYEYLKHLEECVQ |
| | | HEETPDFVSGLSGVLYMLTKIYQLTNEPRVFEVAKTTASRLSVLLDSKQPDTVLTGLSHGA |
| | | AGFALALLTYGTAANDEQLLKQGHSYLVYERNRFNKQENNWVDLRKGNAYQTFWCHGAPGI |
| | | GISRLLLAQFYDDELLHEELNAALNKTISDGFGHNHSLCHGDFGNLDLLLLYAQYTNNPEP |
| | | KELARKLAISSIDQAHTYGWKLGLNHSDQLQGMMLGVTGIGYQLLRHINPTVPSILALELP |
| | | SSTLTEKELRIHDR |
| KgpE | 297 | MKNPTLLPKLTAPVERPAVTSSDLKQASSVDAAWLNGDNNWSTPFAGVNAAWLNGDNNWST |
| | | PFAGVNAAWLNGDNNWSTPFAADGAE |
| KgpF | 298 | MINYANAQLHKSKNLMYMKAHENIFEIEALYPLELFERFMQSQTDCSIDCACKIDGDELYP |
| enzyme | | ARFSLALYNNQYAEKQIRETIDFFHQVEGRTEVKLNYQQLQHFLGADFDFSKVIRNLVGVD |
| | | ARRELADSRVKLYIWMNDYPEKMATAMAWCDDKKELSTLIVNQEFLVGFDFYFDGRTAIEL |
| | | YISLSSEEFQQTQVWERLAKVVCAPALRLVNDCQAIQIGVSRANDSKIMYYHTLNPNSFID |
| | | NLGNEMASRVHAYYRHQPVRSLVVCIPEQELTARSIQRLNMYYCMN |
| LasA | 299 | MDKRVRYEKPSLVKEGTFRKTTAGLRRLFADQLVGRRNI |
| LasB | 300 | MKGEEMLGHPQTGFVVLPDNDATGDVTGRLLPWGDVVTVYPSGRPWIIGNCWDRPVLVHDG |
| enzyme | | VIVLGHTSVTRDQIARHGNDPHRLLDEADGAFHAAVLIGHEVHVRGSAYGVCRLYTCVVDG |
| | | VTLVSDRTDVLQRLAGTDVDVDVLAGHLLEPIPHWLGEQPLLTSVEPVPPTHHVILTPDAR |
| | | SRLRPSRRRRPEPSLGLRDGAELVRERLAAAVATRVDSPALITSELSGGYDSTSVSYLAAR |
| | | GKAEVVLVTAAGRDSTSEDLWWAERAAAGLPELDHVVLPADELPFTYAGLTEPGALLDEPC |
| | | TAVAGRERVLALVRKAAARGSTLHLTGHGGDHLFTSLPTPFHDLFRTRPVAALRQLRAFGA |
| | | LAAWPTRKLMRELADRRDHSTWWRAHARPQNGQPDPHSPMLGWAIPPTVPAWVTADGVRAI |
| | | ELGILEMAERAEPLGHARGEHAELDSIFEGARMARGLNRMATHAGVPLAAPFHDDRVVEAC |
| | | LSIRPEERISAWQYKPLLNAAMQGVVPSTVLDRSAKDDGSIDVAYGLQEHRDELVALWESS |
| | | RLAETGLIDAGMLRRLCAQPSSHELEHGSLYATIACELWLRGLDQDRTQRY |
| LasC | 301 | MPVQLRRHVSFTATEYGGVLLDETKGAYWRLNTTGAEVVRAMGEAERDEIVRHVVATFDVD |
| enzyme | | AQTAAQDVDVLLAELRDAGLVAS |
| LasD | 302 | MSVNMALRGHGMSGRRRRLDATRARLAVVVARVLNLLPPRLIRRCLRVLSRGARPASIEAA |
| enzyme | | EAARRTVVAVSPAAAGAYGCLIRSIATTLVLRSRGQWPTWCVGVRAEPPFGAHAWIEAEER |
| | | LVDEPGTMHTYRRLITVGPLSRKVR |
| LasF | 303 | MSIELTPSLADLVDPLPGHALRAAATLRLADLIAAGADTAPALAAAARIDADAIARLMRYL |
| enzyme | | CSRGIFQAHEGRYALTEFSELLLDEDPSGLRKTLDQDSYGDRFDRAVAELVDVVRSGEPSY |
| | | PRLYGSTVYDDLAADPALGEVFADVRGLHSAGYGEDVAAVAGWSSCLRVVDLGGGTGSVLL |
| | | AVLERHPSLSGAVLDLPYVAPQAKKALQASAFAQRCEFIKGSFFDPLPPADRYLLCNVLFN |
| | | WDDAQAGAILARCAQAGPVAGVVVAERLIDPDAEVELVAAQDLRLLAVCGGRQRGTAEFEA |
| | | LGAAHGLALTSVTLTASGMSLLRFDVCRAGSAGGEVVEKS |
| LcnA | 304 | MTKGLDKMLLTKKKKDSMGLLNEIDVTTLDEQLGGKMSKAWCRSMVVSCVYNLVDFSSSSD |
| | | GKKTCALYRKYC |
| LcnG | 305 | MDGTNKRLEDKWFDINFLEMYTRSCLKTFGYFDEILIVKKRIEVLKNVLEKQYLSTNDYAE |
| enzyme | | EFFELNTTLESIKEYIKLNLVIEKEP1SICIMVKNEERCIKRCIDSVEILAEEIIIIDTGS |
| | | TDNTINIIEECANDKIKVFSKEWRNDFSEIRNYAIEKASSEWLVFIDADEYLDEASVLNLL |
| | | STLNIFNNHKLKDSIVLCPMINEANNTIHFRTGKFFRKDSGIKFFGTCHEEPRIKGMPNST |
| | | LLIPIKVDYLHDGYLAKVQSNKDKKTRNIELLEGMVELEPDNPRWAYMFVRDGFAILDNEY |
| | | IEKTCLRFLLLDKNVRICVNNLQDHKFTLSLLTILGRLYLRECEFEKSNLIIRILDELIPN |
| | | SLDGKFLAFMERFSKLKIEINTLLTEVIEYRRNHEVDETSLINTQGYHIDYVLSILLFETG |
| | | NYAQSKKYFDFLQENHFLEELFQDSSYSIILKMLESVED |
| LtnA1 | 306 | MNKNEIETQPVTWLEEVSDQNFDEDVFGACSTNTFSLSDYWGNNGAWCTLTHECMAWCK |
| LtnA2 | 307 | MKEKNMKKNDTIELQLGKYLEDDMIELAEGDESHGGTTPATPAISILSAYISTNTCPTTKC |
| | | TRAC |
| LtnM1 | 308 | MKFNKNVFPEINETDFDNNIKPLLDELESRITIPQEELSFSSINDDLFRELTRNEEYPYQS |
| enzyme | | ICTIVANIVMDDGSEIWRKDIFVDSNSVREAVCDILSQTLFLYFIRCFSEQIKDIRKTDED |
| | | KESTYNRYINLLFSSNFKIFSDEYPVLWYRTIRIIKNRWYSIKKSLLLTQKHRVEIDKQLD |
| | | IPHKMKIKGLKIGGDTHNGGATVTTIFFEKGYKLIYKPRSTSGEFSYKKFIEKINPYLKKD |
| | | MGAIKAIDFGEYGFSEYIECNTDEEDMKQVGQLAFFMYLLNASDMHYSNVIWTKQGPVPID |
| | | LETLFQPDRIRKGLKQSETNAYHKMEKSVYGTGIIPISLSVKGKKGEVDVGFSGIRDERSS |
| | | SPFRVLEILDGFSSDIKIVWKKQQKSSSSKNNLIVDHKKEREILQRAQSVVEGFQETSKIF |
| | | MKHREEFISIILDSFENIKIRYIHNMTFRYEQLLRTLTDAEPAQKIELDRLLLSRTGILSI |
| | | SSSPYISLSECQQMWQGDVPYFYSKFSSKSIFDTNGFVDEIELTPRQAFIIKAESITNDEV |
| | | DFQSKIIKLAFMARLSDPHTTNDNKLNKKVIIESNQQSNSSESGNKAILFLSDLLKNNVLE |
| | | DRYSHLPKTWIGPVARDGGLGWAPGVLGYDLYSGRTGPALALAAAGRVLKDKDSIELSADI |
| | | FNKSSQILQEKTYDFRNLFASGIGGFSGITGLFWALNAAGNILNNDDWIKTSNQSMLLLNE |
| | | NMLKVDKNFFDLISGNSGAIGMMYLTNPNFYLSRSKINDILLTTDCLITEMEKDETSGLAH |
| | | GVSQILWFLSIMMQRQPSSEIKIRATIVDNIIKKKYTNSYGEIECYYPTDGHSKSTSWCNG |
| | | TSGILVAYIEGYKANIVDKSSVYHIINQINVEQLQHDNIPIMCHGSLGVYESLKYASKYFE |
| | | IETKYLLDVMRNGGCSSQEVLKYYGKGNGRYPLSPGLMAGQSGALLHCCKLEDNDISVSPI |
| | | SLMT |
| LtM2 | 309 | MDPSIKKLVDSIIEFYKKDIYLAYKELEREIKNIDKTIYNTSNDEILRIFKESLISIITDD |
| enzyme | | IYRLSIKTFIYEFHKFRIDNGFPAVKDSESAFNYYISTFDVKTIARWFEKFPMLESIISSS |
| | | IKNDCTFMVDVCVNFILDLSECEKINLISEDSRLITISSSNSDPHNGGTRVLFFRFHNGDT |
| | | ILYKPRSLTVDKLISNIFEEVFEFDATNSKNPIPKVLDRGTYGWQEFIEKKSISSSEIKQA |
| | | YYNLGIFSSIFTVLGSTDIHDENLIFKGTTPYFIDLETALSPRIRYEGNEENLFYRMSSSL |
| | | FTSIVGTTIIPAKLAVHSQEIMIGAINTPAKQKTKKDGFNIINFGTDAVDIAKQNIEVERI |
| | | ANPMRIKNNIVNDPLPYQNIFTRGFKEGIKSIILKKGSIISILNNFNSPIRYIMRPTAKYY |
| | | LILDAAVFPENLYSEQTLNKTLNYLKPPKIVENSLISKQLFLAEKRILSEGDIPSFYVLGK |
| | | EKNIRAQNFISEQIFEETAVDNAIQILESISQDWVNFNERLIAEGFSYIREQSRGYLSSDF |
| | | ENSDIFKSSLTETKKSGYTAMLKTIISMSVKTSENKKIGWLPGIYDDYPISYMSAAFCSFH |
| | | DSGGIITLLEHHFGHCSPEYNEMKRGLLELGKMLKINNSNLSIISGSESLEFLYTHREVEC |
| | | LELEYILNNSAEIMGDVFLGKLGLYLILASYLKTDLKIFQDFSIICQKNLEFKKFGIAHGE |
| | | LGYLWTIFRIQNKLKNKNACLSIYHEVLNIYKGKRIESVGWCNGLSGILMILSEMSTVLEK |
| | | NQDYLFKLANLSTKLNEESVDLSVCHGASGVLQTLLFVYSNTNDKRYLSLANKYWKKVLDN |
| | | SIKYGFYNGERDKDYLLGYFQGWSGFTDSALLLDKYNNNEQVWIPINLSSDIYQHNLNNCK |
| | | EKNYEGDGCHKS |
| LynD | 310 | MQSTPLLQIQPHFHVEVIEPKQVYLLGEQANHALTGQLYCQILPLLNGQYTLEQIVEKLDG |
| enzyme | | EVPPEYIDYVLERLAEKGYLTEAAPELSSEVAAFWSELGIAPPVAAEALRQPVTLTPVGNI |
| | | SEVTVAALTTALRDIGISVQTPTEAGSPTALNVVLTDDYLQPELAKINKQALESQQTWLLV |
| | | KPVGSVLWLGPVFVPGKTGCWDCLAHRLRGNREVEASVLRQKQAQQQRNGQSGSVIGCLPT |
| | | ARATLPSTLQTGLQFAATEIAKWIVKYHVNATAPGTVFFPTLDGKIITLNHSILDLKSHIL |
| | | IKRSQCPTCGDPKILQHRGFEPLKLESRPKQFTSDGGHRGTTPEQTVQKYQHLISPVTGVV |
| | | TELVRITDPANPLVHTYRAGHSFGSATSLRGLRNTLKHKSSGKGKTDSQSKASGLCEAVER |
| | | YSGIFQGDEPRKRATLAELGDLAIHPEQCLCFSDGQYANRETLNEQATVAHDWIPQRFDAS |
| | | QAIEWTPVWSLTEQTHKYLPTALCYYHYPLPPEHRFARGDSNGNAAGNTLEEAILQGFMEL |
| | | VERDGVALWWYNRLRRPAVDLGSFNEPYFVQLQQFYRENDRDLWVLDLTADLGIPAFAGVS |
| | | NRKTGSSERLILGFGAHLDPTIAILRAVTEVNQIGLELDKVPDENLKSDATDWLITEKLAD |
| | | HPYLLPDTTQPLKTAQDYPKRWSDDIYTDVMTCVNIAQQAGLETLVIDQTRPDIGLNVVKV |
| | | TVPGMRHFWSRFGEGRLYDVPVKLGWLDEPLTEAQMNPTPMPF |
| McbA | 311 | MELKASEFGVVLSVDALKLSRQSPLGVGIGGGGGGGGGGGSCGGQGGGCGGCSNGCSGGNG |
| | | GSGGSGSHI |
| McbC | 312 | MSKHELSLVEVTHYTDPEVLAIVKDFHVRGNFASLPEFAERTFVSAVPLAHLEKFENKEVL |
| enzyme | | FRPGFSSVINISSSHNFSRERLPSGINFCDKNKLSIRTIEKLLVNAFSSPDPGSVRRPYPS |
| | | GGALYPIEVFLCRLSENTENWQAGTNVYHYLPLSQALEPVATCNTQSLYRSLSGGDSERLG |
| | | KPHFALVYCIIFEKALFKYRYRGYRMALMETGSMYQNAVLVADQIGLKNRVWAGYTDSYVA |
| | | KTMNLDQRTVAPLIVQFFGDVNDDKCLQ |
| McbD | 313 | MINVYSNLMSAWPATMAMSPKLNRNMPTFSQIWDYERITPASAAGETLKSIQGAIGEYFER |
| enzyme | | RHFFNEIVTGGQKTLYEMMPPSAAKAFTEAFFQISSLTRDEIITHKFKTVRAFNLFSLEQQ |
| | | EIPAVIIALDNITAADDLKFYPDRDTCGCSFHGSLNDAIEGSLCEFMERQSLLLYWLQGKA |
| | | NTEISSEIVTGINHIDEILLALRSEGDIRIFDITLPGAPGHAVLTLYGTKNKISRIKYSTG |
| | | LSYANSLKKALCKSVVELWQSYICLHNFLIGGYTDDDIIDSYQRHFMSCNKYESFTDLCEN |
| | | TVLLSDDVKLTFEENITSDTNLLNYLQQISDNIFVYYARERVSNSLVWYTKIVSPDFFLHM |
| | | NNSGAININNKIYHTGDGIKVRESKMVPFP |
| MdnA | 314 | MAYPNDQQGKALPFFARFLSVSKEESSIKSPSPEPTYGGTFKYPSDWEDY |
| MdnA* | 315 | MALPFFARFLSVSKEESSIKSPSPEPTYGGTFKYPSDWEDY |
| MdnC | 316 | MTVLIVTFSHDNESIPLVIKAIEAMGKKAFRFDTDRFPTEVKVDLYSGGQKGGIITDGEQK |
| enzyme | | LELKEVSSVWYRRMRYGLKLPDGMDSQFREASLKECRLSIRGMIASLSGFHLDPIAKVDHA |
| | | NHKQLQLQVAQQLGLLIPGTLTSNNPEAVKQFAREFEATGIVTKMLSQFAIYGDKQEEMVV |
| | | FTSPVTKEDLDNLEGLQFCPMTFQENIPKALELRITIVGEQIFTAAINSQQLDGAIYDWRK |
| | | EGRALHQQWQPYDLPKTIEKQLLELVKYFGLNYGAIDMIVTPDERYIFLEINPVGEFFWLE |
| | | LYPPYFPISQAIAEILVNS |
| MibA | 317 | MPADILETRTSETEDLLDLDLSIGVEEITAGPA |
| MibD | 318 | MTAHSDAGGDPRPPERLLLGVSGSVAALNLPAYIYAFRAAGVARLAVVLTPAAEGFLPAGA |
| enzyme | | LRPIVDAVHTEHDQGKGHVALSRWAQHLLVLPATANLLGCAASGLAPNFLATVLLAADCP1 |
| | | TFVPAMNPVMWRKPAVRRNVATLRADGHHVVDPLPGAVYEAASRSIVEGLAMPRPEALVRL |
| | | LGGGDDGSPAGPAGPVGRAEHVGAVEAVEAVEAVEAVEAAEALA |
| MibH | 319 | MARSEESNTLARLFDVLGDDAAAAREWVTEPHRLIASNERLGTAPEAPADDDPEAIRTVGV |
| enzyme | | IGGGTAGYLTALALKAKRPWLDVALVESADIPIIGVGEATVSYMVMFLHHYLGIDPAEFYQ |
| | | HVRPTWKLGIRFEWGSRPEGFVAPFDWGTGSVGLVGSLRETGNVNEATLQAMLMTEDRVPV |
| | | YRGEGGHVSLMKYLPFAYHMDNARLVRYLTELATRRGVHHVDATVAEVRLDGPDHVGDLIT |
| | | TDGRRLHYDFYVDCTGFRSLLLEKALGIPFESYASSLFTDAAITGTLAHGGHLKPYTTATT |
| | | MNAGWCWTIPTPESDHLGYVFSSAAIDPDDAAAEMARRFPGVTREALVRFRSGRHREAWRG |
| | | NVIAVGNSYAFVEPLESSGLLMIATAVQILVSLLPSSRRDPLPSNVANQALAHRWDAIRWF |
| | | LSIHYRFNGRLDTPFWKEARAETDISGIEPLLRLFSAGAPLTGRDSFARYLADGAAPLFYG |
| | | LEGVDTLLLGQEVPARLLPPRESPEQWRARAAAARSLASRGLRQSEALDAYAADPCLNAEL |
| | | LSDSDSWAGERVAVRAGLR |
| MibO | 320 | MIFGPDFHRDPYPVYRRLRDEAPCHHEPALGLYALSRYEDVLAALRQPTVFSSAARAVASS |
| enzyme | | AAGAGPYRGADTVSPERETAAEGPARSLLFLDPPEHQVLRQAVSRGFTPQAVLRLEPAVRD |
| | | IAAGLADRIPDRGGGEFVTEFAAPLAIAVILRLLGVPEADRARVSELLSASALSGAEAELR |
| | | SYWLGLSALLRDREDAGEGDGEDRGVVAALVRPDAGLRDADVAAGPAVRAPLTDEQVAAFC |
| | | ALVGQAGTESVAMALSNALVLFGRHHDQWRTLCARPDAIPAAFEEVLRYWAPTQHQGRTLT |
| | | AAVRLHGRLLPAGAHVLLLTGSAGRDERAYPDPDVFDIGRFHPDRRPSTALGFGLGAHFCL |
| | | GAALARLQARVALRELTRRFPRYRTDEERTVRSEVMNGFGHSRVPFST |
| MibS | 321 | MTTGTTVAHAVEPDGFRAVMATLPAAVAIVTAAAADGRPWGMTCSSVCSVTLTPPTLLVCL |
| enzyme | | RTASPTLAAVVSGRAFSVNLLCARAYPVAELFASAAADRFDRVRWRRPPGTGGPHLADDAR |
| | | AVLDCRLSESAEVGDHVVVFGQVRAIRRLSDEPPLMYGYRRYAPWPADRGPGAAGG |
| PaaA | 322 | MSLTNVKPLIKESHHIILADDGDICIGEIPGVSQVINDPPSWVRPALAKMDGKRTVPRIFK |
| enzyme | | ELVSEGVQIESEHLEGLVAGLAERKLLQDNSFFSKVLSGEEVERYNRQILQFSLIDADNQH |
| | | PFVYQERLKQSKVAIFGMGGWGTWCALQLAMSGIGTLRLIDGDDVELSNINRQVLYRTDDV |
| | | GKNKVDAAKDTILAYNENVHVETFFEFASPDRARLEELVGDSTFIILAWAALGYYRKDTAE |
| | | EIIHSIAKDKAIPVIELGGDPLEISVGPIYLNDGVHSGFDEVKNSVKDKYYDSNSDIRKFQ |
| | | EARLKHSFIDGDRKVNAWQSAPSLSIMAGIVTDQVVKTITGYDKPHLVGKKFILSLQDFRS |
| | | REEEIFK |
| PaaP | 323 | MIKFSTLSQRISAITEENAMYTKGQVIVLS |
| PadeA | 324 | MKKQYSKPSLEVLDVHQTMAGPGTSTPDAFQPDPDEDVHYDS |
| PadeK | 325 | MTERAAVRTDHYKAFGFRIESDFVLPELPPAGEREPLDNITVRRTDLQPLWNSSIHFYGNF |
| enzyme | | AILDHGRTVMFRVPGAAIYAVQDASSILVSPFDQAEENWVRLFILGTCIGIILLQRKIMPL |
| | | HGSAVAIDGKAYAIIGESGAGKSTLALHLVSKGYPLLSDDVIPVVMTQGSPWVVPSYPQQK |
| | | LWVDTLKHMGMDNANYTPLYERKTKFAVPVGSNFHEEPLPLASIFELVPWDAATHIAPIQG |
| | | MERFRVLFHHTYRNFLVQPLGLMEWHFKTLSSFVHQIGMYRLHRPMVGFSTLDLTSHILNI |
| | | TRQGENDQ |
| PalA | 326 | MKDLLKELMYEVDLEEMENLQGSGYSAAQCAWMALSCVNYIPGVGFGCGGYSACELYKRYC |
| PalS | 327 | MGNLRDFYQLMKDNYADSNLFKDLNLIHNISNDIQIGINCDFSEMLGELVGNYDSLNYPSI |
| enzyme | | TCGILTYNEERCIKRCLESVVNEFDEIIVLDSVSEDNTVKIIKENFNDVKVYVEPWKNDFS |
| | | FHRNKIINLATCDWIYFIDADNYYDSKNKGKAMRIAKVMDFLKIEGVVSPTVIEHDNSMSR |
| | | DTRKMFRLKDNILFSGKVHEEPVYANGEIPRNIIVDINVFHDGYNPKIINMMEKNERNITL |
| | | TKEMMKIEPNNPKWLYFYSRELYQTQRDIALVQSVLFKALELYENSSYTRYYVDTIALLCR |
| | | VLFESKNYQKLTECLNILENNTLNCSDIDYYNSALLFYNLLLRIKKISSTLKENIDMYERD |
| | | YHSFINPSHDHIKILILNMLLLLGDYQDAFKVYKEIKSIEIKDEFLVNVNKFKDNLLSFID |
| | | SINKI |
| PapA | 328 | MLKQINVIAGVKEPIRAYGCSANDACYFCDTRDNCKACDASDFCIKSDT |
| PapA_tev | 329 | LKQINVIAGVKEPIRAYENLYFQGCSANDACYFCDTRDNCKACDASDFCIKSDT |
| PapB | 330 | MANLIQDREDELIHFHPYKLFEVDSKTFFYNVVTNAIFEIDSLIIDILHSKGKNEEHVVKD |
| enzyme | | LAERYELSQVREAIQNMKEAYIIATDANISDVEKMGILDNSQRVFKLSSLTLFMVQECNLR |
| | | CTYCYGEEGEYNQKGKMTSEIARSAVDFLIQQSGEIEQLNITFFGGEPLLNFPLIQETVQY |
| | | VHEQSEIHNKKFSFSITTNGTLITPKIKNFFYKHHFAVQTSIDGDEKTHNFNRFFKGGQGS |
| | | YDLLLKRTEEMRNDRKIGARGTVTPAELDLSKSFDHLVKLGFRKIYLSPALYSLSDDHYDT |
| | | LSKEMVKLVEQFRELLEREDYVTAKKMSNVLGMLSKIHSGGPRIHFCGAGTNAAAVDVRGN |
| | | LFPCHRFVGEDECSIGNLFDEDPLSKQYNFIENSTVRNRTTCSKCWAKNLCGGGCHQENFA |
| | | ENGNVNQPVGKLCKVTKNFINATINLYLQLTQEQRSILFG |
| PapoA | 331 | SKKEWQEPTIEVLDINQTMAGKGWKQIDWVSDHDADLHNPS |
| PapoK | 332 | MHDRSANVSWTKYIAFGLRIASELNLPELILAAPEAVEDVVIRQADLTAWSGQLEQANFVM |
| enzyme | | LDERFMFQIPGTAIYAVREGKEIEVSIFSGADPDTVRLFVLGTCMGVLLMQRRILPIHGSA |
| | | VVIGGRAYAFVGESGTGKSTLAAAFRQAGYQMVSDDVIAVKATASSAIVYPAYPQQKLGLD |
| | | SLLQLEALRENKHARKRNNIRSLTDGNSVMPQYSDLRMLAGELNKYAVPAVDEFFNDPLPL |
| | | GGVFELVADSPIRALMREGELVAVTEQPLNVLECLHTLLQHTYRRVIIPRMGLSEWSFDTA |
| | | ARMARKVEGWRLLRDSSVFTASEVVQRVLDIIRKEEKSYGSH |
| PbtA | 333 | MNLNDLPMDVFEMADSGMEVESLTAGHGMPEVGASCNCVCGFCCSCSPSA |
| PbtM1 | 334 | MLSSALEVDIDEAAVAADLRELAAALDRSGYGEILTCFLPQKAQAHIWAQTAAKIDGPLRT |
| enzyme | | LMELFLLGRAVPQDDLPPRIAAVIPGLVSAGLVKTGQGAVWLPNLILLRPMGQWLWCQRPH |
| | | PSPTMYFGDDSLALVHRMVTYRGGRALDLCAGPGVQALTAALRSEHVTAVEINPVAAALCR |
| | | TNIAMNGLSDRMEVRLGSLYDVVRGEVFDDIVSNPPLLPVPEDVQFAFVGDGGRDGFDISW |
| | | TILDGLPEHLSDRGACRIVGCVLSDGYVPVVMEGLGEWAAKHDFDVLLTVTAHVEAHKDSS |
| | | FLRSMSLMSSAISGRPAEELQERYAADYAELGGSHVAFYELCARRGGGSARLADVSATKRS |
| | | AEVWFV |
| PbtO | 335 | MTQYPLSRPEPLGVHPDYRRLRETCPVARVGSPYGPAWLVTRYADVAAVLTDARFSRAAAP |
| enzyme | | EDDGGILLNTDPPEHDRLRKLIVAHTGTARVERLRPRAEEIAVALARRIPGEGEFISAFAE |
| | | PFSHRVLSLFVGHLVGLPAQDLGPLATVVTLAPVPDRERGAAFAELCRRLGRQVDRETLAV |
| | | VLNVVFGGHAAVVAALGYCLLAALDAPLPRLAGDPEGIAELVEETLRLAPPGDRTLLRRTT |
| | | EPVELGGRTLPAGALVIPSIAAANRDPDRPVGRRMPRHLAFGRGAHACLGMALARMELQAA |
| | | LKALAEHAPDVRLPAGTGALVRTHEELSVSPLAGIPIQR |
| PcpA | 336 | MSSNILEKVKEFFVRLVKDDAFQSQLQNNSIDEVRNILQEAGYIFSKEEFETATIELLDLK |
| | | ERDEFHELTEEELVTAVGGVTGGSGIYGPIQAMYGAVVGDPKPGKDWGWRFPSPLPKPSPI |
| | | PSPWKPPVDVQPMYGVVVSNDS |
| PcpX | 337 | MTYRRTSYAVWEITLKCNLACSHCGSRAGHTRAKELSTQEALDLVRQMADVGIIEVTLIGG |
| enzyme | | EAFLRPDWLQIAEAITKAGMLCSMTTGGYGISLETARKMKAAGIASVSVSIDGLEETHDRL |
| | | RGRKGSWQAAFKTMSHLREVGIFFGCNTQINRLSAPEFPLIYERIRDAGARAWQIQLTVPM |
| | | GRAADNANILLQPYELLDLYPMIARVARRARQEGVQIQPGNNIGYYGPYERLLRGRGSDSE |
| | | WAFWQGCAAGLSTLGIEADGAIKGCPSLPTSAYTGGNIREHSLREIVEESEQLRFNLGAGT |
| | | SQGTAHLWGFCQTCEFSELCRGGCTWTAHVFFNRRGNNPYCHHRALFQAEQGIRERVVPKV |
| | | EAQGLPFDNGEFELIEEPIDAPLPENDPLHFTSDLVQWSASWQEESESIGAVVD |
| PcpY | 338 | MVENIDNEREKSANEIEPESLLLPRQAWQSQIAYLKAILKAKQALDRIEKRYLR |
| enzyme | | |
| Pgm2 | 339 | MEREIVWTEIEESDLAAVVSASNVKDGPTVSSSNVKDR |
| PlpA1 | 340 | MSIENAKSFYERVSTDKQFRTQLENTASAEERQKIIQAAGFEFTNQEWEIAKEQILATSES |
| | | NNGELSEAELTAVSGGVDLSIFELLDEEPLFPIRPLYGLP1 |
| PlpA2 | 341 | MSIESAKAFYQRMTDDASFRTPFEAELSKEERQQLIKDSGYDFTAEEWQQAMTEIQAARSN |
| | | EELNEEELEAIAGGAVAAMYGVVFPWDNEFPWPRWGG |
| PlpX | 342 | MTKKYRRVSYAVWEITLKCNLACSHCGSRAGQARTKELSTEEAFNLVRQLADVGIKEVTLI |
| enzyme | | GGEAFMRSDWLEIAKAVTEAGMICGMTTGGFGVSLETARKMKEAGIKTVSVSIDGGIPETH |
| | | DRQRGKKGAWHSAFRTMSHLKEVGIYFGCNTQINRLSASEFPIIYERIRDAGARAWQIQLT |
| | | VPMGNAADNADMLLQPYELLDIYPMLARVAKRAKQEGVRIQAGNNIGYYGPYERLLRGSDE |
| | | WTFWQGCGAGLNTLGIEADGKIKGCPSLPTAAYTGGNIRDRPLREIVEQTEELKFNLKAGT |
| | | EQGTDHMWGFCKTCEFAELCRGGCSWTAHVFFDRRGNNPYCHHRALKQAQKDIRERFYLKV |
| | | KAKGNPFDNGEFVIIEEPFNAPLPENDLLHFNSDHIQWPENWQNSESAYALAK |
| PlpY | 343 | MNSNQIPNKVATAAQKSDDSSSVLPRQGWQDKQAFIKALIKAKQSLEIAEISNFLT |
| enzyme | | |
| ProcA* | 344 | MSEEQLKAFIAKVQADTSLQEQLKVEGADVVAIAKASGFAITTEDLNSHRQNLSDDELEGV |
| | | AGGFFCVQGTANRFTINVC |
| ProcA1.7 | 345 | MSEEQLKAFIAKVQADTSLQEQLKVEGADVVAIAKASGFAITTEDLKAHQANSQKNLSDAE |
| | | LEGVAGGTIGGTIGGTIVSITCETCDLLVGKMC |
| ProcM | 346 | MESPSSWKTSWLAAIAPDEPHKFDRRLEWDELSEENFFAALNSEPASLEEDDPCFEEALQD |
| enzyme | | ALEALKAAWDLPLLPVDNNLNRPFVDVWWPIRCHSAESLRQSFVSDSAGLADEIFDQLADS |
| | | LLDRLCALGDQVLWEAFNKERTPGTMLLAHLGAAGDGSGPPVREHYERFIQSHRRNGLAPL |
| | | LKEFPVLGRLIGTVLSLWFQGSVEMLQRICADRTVLQQCFAIPCGHHLKTVKQGLSDPHRG |
| | | GRAVAVLEFADPNSTANSSMHVVYKPKDMAVDAAYQATLADLNTHSDLSPLRTLAIHNGNG |
| | | YGYMEHVVHHLCANDKELTNFYFNAGRLTALLHLLGCTDCHHENLIACGDQLLLIDTETLL |
| | | EADLPDHISDASSTTAQPKPSSLQKQFQRSVLRSGLLPQWMFLGESKLAIDISALGMSPPN |
| | | KPERIALGWLGFNSDGMMPGRVSQPVEIPTSLPVGIGEVNPFDRFLEDFCDGFSMQSEALI |
| | | KLRNRWLDVNGVLAHFAGLPRRIVLRATRVYFTIQRQQLEPTALRSPLAQALKLEQLTRSF |
| | | LLAESKPLHWPIFAAEVKQMQHLDIPFFTHLIDADALQLGGLEQELPGFIQTSGLAAAYER |
| | | LRNLDTDEIAFQLRLIRGAVEARELHTTPESSPTLPPPATPEALMSSSAETSLEAAKRIAH |
| | | RLLELAIRDSQGQVEWLGMDLGADGESFSFGPVGLSLYGGSIGIAHLLQRLQAQQVSLMDA |
| | | DAIQTAILQPLVGLVDQPSDDGRRRWWRDQPLGLSGCGGTLLALTLQGEQAMANSLLAAAL |
| | | PRFIEADQQLDLIGGCAGLIGSLVQLGTESALQLALRAGDHLIAQQNEEGAWSSSSSQPGL |
| | | LGFSHGTAGYAAALAHLHAFSADERYRTAAAAALAYERARFNKDAGNWPDYRSIGRDSDSD |
| | | EPSFMASWCHGAPGIALGRACLWGTALWDEECTKEIGIGLQTTAAVSSVSTDHLCCGSLGL |
| | | MVLLEMLSAGPWPIDNQLRSHCQDVAFQYRLQALQRCSAEPIKLRCFGTKEGLLVLPGFFT |
| | | GLSGMGLALLEDDPSRAVVSQLISAGLWPTE |
| PsnA2 | 347 | MSKNENNKKQLRDLFIEDLGKVTGGKGGPYTTLAIGEEDPITTLAIGEEDPDPTTLALGEE |
| | | DPTTLAIGEE |
| PsnA2_ | 348 | MSKNENNKKQLRDLFIEDLGKVTGENLYFQGKGGPYTTLAIGEEDPITTLAIGEEDPDPTT |
| tev | | LALGEEDPTTLAIGEE |
| PsnB | 349 | MTNLDTSIVVVGSPDDLHVQSVTEGLRARGHEPYVFDTQRFPEEMTVSLGEQGASIFVDGQ |
| enzyme | | QIARPAAVYLRSLYQSPGAYGVDADKAMQDNWRRTLLAFRERSTLMSAVLLRWEEAGTAVY |
| | | NSPRASANITKPFQLALLRDAGLPVPRSLWTNDPEAVRRFHAEVGDCIYKPVAGGARTRKL |
| | | EAKDLEADRIERLSAAPVCFQELLTGDDVRVYVIDDQVICALRIVTDEIDFRQAEERIEAI |
| | | EISDEVKDQCVRAAKLVGLRYTGMDIKAGADGNYRVLELNASAMFRGFEGRANVDICGPLC |
| | | DALIAQTKR |
| RaxST | 350 | MDYHFISGLPRAGSSLLAALLRQNPQLHADVTSPVARLYAAMLMGMSEEHPSNVQIDDAQR |
| enzyme | | VRLLRAVFDAYYQNRQELGTVFDTNRAWCSRLTGLARLFPRSRMICCVRDVGWIVDSFERL |
| | | AQSQPLRLSALFGYDPEDSVSMHADLLTAPRGVVGYALDGLRQAFYGDHADRLLLLRYDTL |
| | | AQRPAQAMEQVYAFLQLPAFAHDYAGVQAEAERFDAALQMPGLHRVRRGVHYVPRRSVLPP |
| | | ALFDQLQELAFWESAPSHGALLV |
| RaxX | 351 | MNHSKKSPAKGAASLQRPAGAKGRPEPLDQRLWKHVGGGDYPPPGANPKHDPPPRNPGHH |
| SboA | 352 | MKKAVIVENKGCATCSIGAACLVDGPIPDFEIAGATGLFGLWG |
| SgbA | 353 | MENQDLELLARLHALPETEPVGVDGLPYGETCECVGLLTLLNTVCIGISCA |
| SgbL | 354 | MTSHATEVEWEDLLRQALHATGTGARWAVEADEMWCRVAPVPGTRREQGWKLHVSATTASA |
| enzyme | | PEVLTRALGVLLREKSGFKFARSLEQVSALNSRATPRGSSGKFITVYPRSDAEAVALARDL |
| | | HAATAGLAGPRILSDQPYAAHSLVHYRYGAFVGRRRLSDDGLLVWFIEDPDGNPVEDKRTG |
| | | RYAPPPWAVCPFPASVPVAPHDGEATSRPVVLGGRFAVREAIRQTNKGGVYRGSDTRTGTG |
| | | VVIKEARPHVEGDASGGDVRDWLRAEARTLEKLKGTGLAPEAVALFEHAGHLFLAQDEVPG |
| | | VTLRTWVAEHFRDVGGERYRADALAQVARLVDLVAAAHARGLVLRDFTPGNVMVRPDGELR |
| | | LIDLELAVLEDEAALPTHVGTPGFSAPERLADAPVRPTADYYSLGATACFVLAGKVPNLLP |
| | | EEPVGRPSEERLAAWLTACTRPLRLPDGVVDMILGLMRDDPAERWDPSRAREALRKADPTA |
| | | RPGDADRTAVRRTGSSAVAGPVPDSRTADGRTADGRSADEVVAGLVDHLVDSMTPADDRLW |
| | | PVSTLTGESDPCTVQQGAAGVLAVLTRYFELTGDPRLPGLLSTAGRWIADRTDVRSPRPGL |
| | | HFGGRGTAWALYDAGRAVDDRRLVEHALDLALAPPQATPHHDVTHGTAGSGLAALHLWQRT |
| | | GDTRFADLAVEAADRLTAAARREPSGVGWAVPAEADSPEGGKRYLGFAHGAAGIGCFLLAA |
| | | AELSRQPDHRATALEVGEGLVADAVRIGEAAQWPAQSGDLPTAPYWCHGAAGIGTFLVRLW |
| | | QATGDDRFGDLARGSAHAVAERASRAPLAQCHGLAGNGDFLLDLADATGDPVHRDTAEELA |
| | | GLILAEGTRRQGHVVFPNEYGEVSSSWSDGSAGILAFLLRTRHTGPRHWMVEQRG |
| StspA | 355 | MKKFYEAPALIERGAFAAATAGFGRLLADQLVGRLIP |
| StspM | 356 | MADHIAAGHDTVLSLAERTGTDPDLLGRVLRFLACRGVFAEPRPGTYALTPLSLTLLEGHP |
| enzyme | | SGLREWLDASGAGARMDAAVGDLLGALRSGEPSYPRLHGRPFYEDLALHSRGPAFDGLRHT |
| | | HAESYVADLLAAYPWERVRRVVDVGGGTGVLVEALMRTHATLRTVLVDLPGAVATATARIA |
| | | AAGFGNRYTPVTGSFFDPLPAGADVYTLVNVVHNWNDERASALLRRCADAGRRDSTFVIVE |
| | | RLADDADPRAITAMDLRMFLFLGGKERTAAQIREVASAAGMAHQSTIKTPSGLHLLVFRKK |
| | | RFAARGHGRRMVT |
| TbtA | 357 | MDLNDLPMDVFELADSGVAVESLTAGHGMTEVGASCNCFCYICCSCSSA |
| TfxA | 358 | MDNKVAKNVEVKKGSIKATFKAAVLKSKTKVDIGGSRQGCVA |
| TgnA* | 359 | MYRPYIAKYVEEQTLQNSTNLVYDDITQISFINKEKNVKKINLGPDTTIVTETIENADPDE |
| | | YFL |
| TgnB | 360 | MKTILIITNTLDLTVDYIINRYNHTAKFFRLNTDRFFDYDINITNSGTSIRNRKSNLIINI |
| enzyme | | QEIHSLYYRKITLPNLDGYESKYWTLMQREMMSIVEGIAETAGNFALTRPSVLRKADNKIV |
| | | QMKLAEEIGFILPQSLITNSNQAAASFCNKNNTSIVKPLSTGRILGKNKIGIIQTNLVETH |
| | | ENIQGLELSPAYFQDYIPKDTEIRLTIVGNKLFGANIKSTNQVDWRKNDALLEYKPANIPD |
| | | KIAKMCLEMMEKLEINFAAFDFIIRNGDYIFLELNANGQWLWLEDILKFDISNTIINYLLG |
| | | EPI |
| ThcoA | 361 | MRKKEWQTPELEVLDVRLTAAGPGKAKPDAVQPDEDEIVHYS |
| ThcoK | 362 | MTRTNTGYRYRAFGLRIDSDIPLPELGDGTRPDGDADLTVVRCGEAEPEWAEGGGGGRLYA |
| enzyme | | AEGIVSFRVPQTAAFRITNGNRIEVHAYSGADEDRIRLYVLGTCMGALLLQRRILPLHGSV |
| | | VARDGRAYAIVGESGAGKSTMSAALLERGFRLVTDDVAAIVFDERGTPLVMPAYPQQKLWQ |
| | | DSLDRLQIAGSGLRPLFERETKYAVPADGAFWPEPVPLVHIYELVHSDGQTPELQPIAKLE |
| | | RCYTLYRHTFRRSLIVPSGLSAWHFETAVKLAEKTGMYRLMRPAKVFAARESARLIETHAD |
| | | GEVSR |
| TruD | 363 | MQPTALQIKPHFHVEIIEPKQVYLLGEQGNHALTGQLYCQILPFLNGEYTREQIVEKLDGQ |
| enzyme | | VPEEYIDFVLSRLVEKGYLTEVAPELSLEVAAFWSELGIAPSVVAEGLKQPVTVTTAGKGI |
| | | REGIVANLAAALEEAGIQVSDPRDPKAPKAGDSTAQLQVVLTDDYLQPELAAINKEALERQ |
| | | QPWLLVKPVGSILWLGPLFVPGETGCWHCLAQRLQGNREVEASVLQQKRALQERNGQNKNG |
| | | AVSCLPTARATLPSTLQTGLQWAATEIAKWMVKRHLNAIAPGTARFPTLAGKIFTFNQTTL |
| | | ELKAHPLSRRPQCPTCGDRETLQRRGFEPLKLESRPKHFTSDGGHRAMTPEQTVQKYQHLI |
| | | GPITGVVTELVRISDPANPLVHTYRAGHSFGSATSLRGLRNVLRHKSSGKGKTDSQSRASG |
| | | LCEAIERYSGIFQGDEPRKRATLAELGDLAIHPEQCLHFSDRQYDNRESSNERATVTHDWI |
| | | PQRFDASKAHDWTPVWSLTEQTHKYLPTALCYYRYPFPPEHRFCRSDSNGNAAGNTLEEAI |
| | | LQGFMELVERDSVCLWWYNRVSRPAVDLSSEDERYFLQLQQFYQTQNRDLWVLDLTADLGI |
| | | PAFVGVSNRKAGSSERIILGFGAHLDPTVAILRALTEVNQIGLELDKVSDESLKNDATDWL |
| | | VNATLAASPYLVADASQPLKTAKDYPRRWSDDIYTDVMTCVEIAKQAGLETLVLDQTRPDI |
| | | GLNVVKVIVPGMRFWSRFGSGRLYDVPVKLGWREQPLAEAQMNPTPMPF |
| TruE* | 364 | MNKKNILPQLGQPVIRLTAGQLSSQLAELSEEALGGVDASYAVFWPICSYDD |
| TruE | 365 | MNKKNILPQLGQPVIRLTAGQLSSQLAELSEEALGGVDASTLPVPTLCSYDGVDASTVPTL |
| | | CSYDD |

TABLE 18
Genetic Parts
Promoters

| | | SEQ |
|---|---|---|
| Name | Sequence | ID NO |
| P_{CymRC} | AACAAACAGACAATCTGGTCTGTTTGTATTATGGAAAATTTTTCTGTATAATAGATTC | 366 |
| | AACAAACAGACAATCTGGTCTGTTTGTATTAT | |
| P_{LacI} | GCGGCGCGCCATCGAATGGCGCAAAACCTTTCGCGGTATGGCATGATAGCGCCC | 367 |
| P_{LacIQ} | GCGGCGCGCCATCGAATGGTGCAAAACCTTTCGCGGTATGGCATGATAGCGCCC | 368 |
| P_{LuxB} | ACCTGTAGGATCGTACAGGTTTACGCAAGAAAATGGTTTGTTACAGTCGAATAAA | 369 |
| P_{T5LacO} | AATCATAAAAAATTTATTTGCTTTGTGAGCGGATAACAATTATAATAGATTCAATTGT | 370 |
| | GAGCGGATAACAATT | |
| P_{T7A1} | ATCCCGAAAATTTATCAAAAAGAGTATTGACTTAAAGTCTAACCTATAGGATACTTAC | 371 |
| | AGCCATCGAGAGCTGCG | |

Ribosom binding sites (RBSs)

| | | | SEQ ID |
|---|---|---|---|
| Name | Gene | Sequence | NO: |
| lac1 | LacI | GGAAGAGAGTCAATTCAGGGTGGTGAAT | 372 |
| lux1 | LuxR | GGAAGAGAGTCAATTCAGGGTGGTGAAT | 373 |
| PP_1 | peptide | ACCCAACACCACCAGCAAGCCTAAGGAGGAGAAAT | 374 |
| PP_2 | MBP-TruE* | TTCCACCATCAAAACACGGAGAGTAGCCCAC | 375 |
| ME_1 | AlbA | AGAATCAAGCAAGTCAAAGGAGTTAACCCGA | 376 |
| ME_2 | AlbsB^{b} | AGAGTTTAGGAGAAAGACATAAGGAAATATTAA | 377 |
| ME_3 | AlbsC^{b} | GGAAGCAGCCGTAAAAGGTAGGTTTTTTTT | 378 |
| ME_4 | AlbsT | AGACGCTTGAACCAGCAATAAGGAGAGTAATT | 379 |
| ME_5 | AMdnC | AGAGGCTATATAGGATAGGGGGGTCCCC | 380 |
| ME_6 | AtxB^{b} | AGAGCTGTTAGTCGCTGCCAGGAGGTCCCGT | 381 |
| ME_7 | AtxC^{b} | CTTTTAACATCCCTTCTCATAAGGAGGTTTTA | 382 |
| ME_8 | BamB | GCCCCGTCAGACACCTTCTAAGGAGGACATAT | 383 |
| ME_9 | BsjM | AGAGACGGGCGGCCACCAGGAGGAACGAGA | 384 |
| ME_10 | CapB^{b} | AGAGGCCTACAGATATTCCAGACTAACACTAAGGAGGAAAACG | 385 |
| ME_11 | CapC^{b} | TGGCTTCCGTTTTTCACCACTTGTTAAGGAGTACTTT | 386 |
| ME_12 | CinX | AGAAATTTTTCATACCGAGGGAGGAAAAT | 387 |
| ME_13 | Cln1B^{b} | AGACAGTAGTATAAAGGAGGGTTCAAGT | 388 |
| ME_14 | Cln1C^{b} | TTCAATAAATTAAGGAATTTTG | 389 |
| ME_15 | Cln2B^{b} | AGAACCACTATAAGGAACGATTT | 390 |
| ME_16 | Cln2C^{b} | CAGTATAACTAGAACAACAAGGAGTCAGATA | 391 |
| ME_17 | Cln3B^{b} | AGATCCCGATAAAGGAGGTCCTA | 392 |
| ME_18 | Cln3C^{b} | TAACATAAGGAGGGTTTCTAA | 393 |
| ME_19 | ComQ | AGAGGAACGAGAAATAAGGACACAGATAT | 394 |
| ME_20 | CrnM | AGATCACCCATACCAAGTATAACGAGAACCTCC | 395 |
| ME_21 | CsegB^{b} | AGATCACTGCAATAGTAAGGAGGTATATA | 396 |
| ME_22 | CsegC^{b} | AGCACCGAGGGGTCAATAATAAGGAGGTAAAC | 397 |
| ME_23 | EpiD | ACTGAACTATAAGGTAGGTATATT | 398 |
| ME_24 | HalM1 | CCAATCAAGGAGGTAGAAAACATA | 399 |
| ME_25 | HalM2 | TAAAACCGCTCGTAAGGAGGTCTT | 400 |
| ME_26 | KgpF | AGAACGCAGACAATTTCATAGGAGGTCCCG | 401 |
| ME_27 | LasB^{b} | AGACAATTCATAAGGAGGTTAAGGT | 402 |
| ME_28 | LasC^{b} | CCTACTACTCTGATCCCCATAAGGAGGTTTTTT | 403 |
| ME_29 | LasD^{b} | CAACCTAATCTTAGGCGAGGTCATTTTTT | 404 |
| ME_30 | LasF | AGAGCCATCAGATTTAAGGAACATAAAAA | 405 |
| ME_31 | LcnG | AGACTATCGATAATAGGAGGTAGACC | 406 |
| ME_32 | LtnM1 | AGACAATTGAAGCAGGCTAGCCAGGAGTTCCAT | 407 |
| ME_33 | LtnM2 | AGAATTCCACCCCCCACTAAGGAGGTTTTTT | 408 |
| ME_34 | LynD | CTAAATTCCCCCGAGGTCAATA | 409 |
| ME_35 | McbC | AGAGCTTCACCCTACAAGGAGGATATAGA | 410 |
| ME_36 | MdnC | AGACGCCCGCAACATTTTATTTTAAGGACGACCCA | 411 |
| ME_37 | MibD | AGATAACCCAATCCGTAAGGACACACGTCAAGGAGGCGATTT | 412 |
| ME_38 | MibH^{b} | AGAGCACATCAGACCTAAGGAAAATATAA | 413 |
| ME_39 | MibO | AGAGTTCATCAGTTTATTAGGAAAAT | 414 |
| ME_40 | MibS^{b} | ACCCTGCCATTTTTTTAGCCCAAAGAACACGGAGCATCTTT | 415 |
| ME_41 | PaaA | AGATCATTTCCAATAAGGGGGACACT | 416 |
| ME_42 | PadeK | AGACACCGAAACCTAAGGAGGGATAT | 417 |
| ME_43 | PalS | AGACCAAACAATTAGGAGGACAAAT | 418 |
| ME_44 | PapB | AGAACTAAGGAGGTTAGAGG | 419 |
| ME_45 | PapoK | TTCAATCGTTAAGGAGGTACATAA | 420 |
| ME_47 | PbtM1 | AGAGGAACGGATAAGGAGGTCAATAT | 421 |
| ME_48 | PbtO | AGACGTCACTATCAAACACACTAATACCACATAAGGAGCGAACA | 422 |
| ME_49 | PcpX^{b} | AGACACAGGGAGGTCTTTAT | 423 |
| ME_50 | PcpY^{b} | CACAAGGGGGTAGTAGT | 424 |
| ME_51 | PlpX^{b} | AGAGCCACCATTTATAAGGAGAACCTACCG | 425 |
| ME_52 | PlpY^{b} | ATATAAAGTTAAGGAGTTGCAC | 426 |
| ME_53 | ProcM | AGAAATCACATTACGCATAGGGGGAGGTAGACAC | 427 |
| ME_54 | PsnB | AGACGAATATAAGGAATAAAATA | 428 |
| ME_55 | RaxST | AGAGCCTTCCACAAACTAAGGAGCACAATT | 429 |
| ME_56 | SgbL | AGAAAAACGAGGAGGTAATAG | 430 |
| ME_57 | StspM | AGAGGCGGTATTAAGGGGGCCAGAG | 431 |
| ME_58 | TgnB | AGAAATATTACAACGAGGTAAAGGC | 432 |
| ME_59 | ThcoK | AGAGCATTCCATAAGGAGAAATTTT | 433 |
| ME_60 | TruD | AGACACACTCGAATTACTCAAAGGACCTCTAGCA | 434 |
| ME_61 | TruD | AGCCACACTCGAATTACTCAAAGGACCTCTAGCA | 435 |

Terminators

| | | | SEQ |
|---|---|---|---|
| Name | Details | Sequence | ID NO: |
| B0062 | | CAGATAAAAAAAATCCTTAGCTTTCGCTAAGGATGATTTCT | 436 |
| ECK120029600 | | TTCAGCCAAAAAACTTAAGACCGCCGGTCTTGTCCACTACCTTGCA | 438 |
| | | GTAATGCGGTGGACAGGATCGGCGGTTTTCTTTTCTCTTCTCAA | |
| AraC | Includes 2 | TTGGTAACGAATCAGACAATTGACGGCTCGAGGGAGTAGCATAGGG | 438 |
| | SNPs | TTTGCAGAATCCCTGCTTCGTCCATTTGACAGGCACATTATGCATC | |
| | | GATGATAAGCTGTCAAACATGAGCA | |
| B0053 | aka His | TCCGGCAAAAAAGGGCAAGGTGTCACCACCCTGCCCTTTTTCTTTA | 439 |
| | Operon | AAACCGAAAAGATTACTTCGCGTT | |
| | Terminator | | |
| L3S3P21 | | CCAATTATTGAAGGCCTCCCTAACGGGGGGCCTTTTTTTGTTTCTG | 440 |
| | | GTCTCCC | |
| L3S2P41 | | CTCGGTACCAAAAAAAAAAAAAAAGACGCTGAAAAGCGTCTTTTTT | 441 |
| | | TTTTTTGGTCC | |
| L3S3P41 | g →c SNP to | AAAAAAAAAAAACACCCTAACGGGTGTTTTTTTTTTTTTGGTGTCC | 442 |
| | remove BsaI | C | |
| | site. | | |
| IOT | | TTGGTAACGAATCAGACAATTGACGGCTCGAGGGAGTAGCATAGGG | 443 |
| | | TTTGCAGAATCCCTGCTTCGTCCATTTGACAGGCACATTATGCATC | |
| | | GATGATAAGCTGTCAAACATGAGCAGATCCTCTACGCCGGACGCAT | |
| | | CGTGGCCGGCATCACCGGCGCCACAGGTGCGGTTGCTGGCGCCTAT | |
| | | ATCGCCGACATCACCGATGGGGAAGATCGGGCTCGCCACTTCGGGC | |
| | | TCATGAGCAAATATTTTATCTG | |

Ribozymes

| | | | SEQ |
|---|---|---|---|
| Name | Details | Sequence | ID NO: |
| RiboJ53 | | AGCGGTCAACGCATGTGCTTTGCGTTCTGATGAGACAGTGATGTCG | 444 |
| | | AAACCGCCTCTACAAATAATTTTGTTTAA | |
| ElvJ | | AGCCCCATAGGGTGGTGTGTACCACCCCTGATGAGTCCAAAAGGAC | 445 |
| | | GAAATGGGGCCTCTACAAATAATTTTGTTTAA | |

Linkers/Tags

| | | | SEQ |
|---|---|---|---|
| Name | Details | Sequence | ID NO: |
| ATag-1 | Affinity tag | ATGTCATATTACCACCATCACCATCATCACGACTATGATATTCCCA | 446 |
| | | CAAGCGAGAACTTGTACTTTCAAGGG | |
| ATag-2 | N-terminal | ATGTCATATTACCACCATCACCATCATCACGGGTCCCTGCAG | 447 |
| | SUMO affinity | | |
| | tag | | |
| ATag-3 | C-terminal | ATGTCATATTACCACCATCACCATCATCAC | 448 |
| | sumo affinity | | |
| | tag (N- | | |
| | terminal to the | | |
| | peptide) | | |
| ATag-4 | C-terminal | TCCATTACAAGCCACCATCACCATCATCACGGT | 449 |
| | sumo affinity | | |
| | tag (C- | | |
| | terminal to | | |
| | SUMO) | | |
| Link-1 | N-terminal | CATCACCATCACCACCATGGATATGATATTAGCACAGGT | 450 |
| | SUMO linker | | |
| | v1 | | |
| Link-2 | N-terminal | TGCATGTCATATTACGACTCCATTCCCACAAGCGAGAACTTGTACT | 451 |
| | SUMO linker | TTCAAGGGTGC | |
| | v2 | | |
| Link-3 | C-terminal | CGACTGGTTCCGCGTGGTAGCTATTACGACTCCATTCCCACAAGCG | 452 |
| | sumo linker | AGAAC | |
| RST_{N}* | Concatenation | ATGTCATATTACCACCATCACCATCATCACGGGTCCCTGCAGGACT | 453 |
| | of: ATag-2, | CAGAAGTCAATCAAGAAGCTAAGCCAGAGGTCAAGCCAGAAGTCAA | |
| | SUMO, and | GCCTGAGACTCACATCAATTTAAAGGTGTCCGATGGATCTTCAGAG | |
| | Link-1 | ATCTTCTTCAAGATCAAAAAGACCACTCCTTTAAGAAGGCTGATGG | |
| | | AAGCGTTCGCTAAAAGACAGGGTAAGGAAATGGACTCCTTAAGATT | |
| | | CTTGTACGACGGTATTAGAATTCAAGCTGATCAGGCCCCTGAAGAT | |
| | | TTGGACATGGAGGATAACGATATTATTGAGGCTCACCGCGAACAGA | |
| | | TTGGAGGTCATCACCATCACCACCATGGATATGATATTAGCACAGG | |
| | | T | |
| RST_{N} | Concatenation | ATGTCATATTACCACCATCACCATCATCACGGGTCCCTGCAGGACT | 454 |
| | of: ATag-2, | CAGAAGTCAATCAAGAAGCTAAGCCAGAGGTCAAGCCAGAAGTCAA | |
| | SUMO, and | GCCTGAGACTCACATCAATTTAAAGGTGTCCGATGGATCTTCAGAG | |
| | Link-2 | ATCTTCTTCAAGATCAAAAAGACCACTCCTTTAAGAAGGCTGATGG | |
| | | AAGCGTTCGCTAAAAGACAGGGTAAGGAAATGGACTCCTTAAGATT | |
| | | CTTGTACGACGGTATTAGAATTCAAGCTGATCAGGCCCCTGAAGAT | |
| | | TTGGACATGGAGGATAACGATATTATTGAGGCTCACCGCGAACAGA | |
| | | TTGGAGGTTGCATGTCATATTACGACTCCATTCCCACAAGCGAGAA | |
| | | CTTGTACTTTCAAGGGTGC | |
| RSTc | Concatenation | ATGTCATATTACCACCATCACCATCATCAC[]CGACTGGTTCCGCG | 455 |
| | of: ATag-3, | TGGTAGCTATTACGACTCCATTCCCACAAGCGAGAACGACTCAGAA | |
| | peptide insert, | GTCAATCAAGAAGCTAAGCCAGAGGTCAAGCCAGAAGTCAAGCCTG | |
| | Link-3, | AGACTCACATCAATTTAAAGGTGTCCGATGGATCTTCAGAGATCTT | |
| | SUMO, ATag- | 4CTTCAAGATCAAAAAGACCACTCCTTTAAGAAGGCTGATGGAAGC | |
| | 4. Site for | GTTCGCTAAAAGACAGGGTAAGGAAATGGACTCCTTAAGATTCTTG | |
| | peptide | TACGACGGTATTAGAATTCAAGCTGATCAGGCCCCTGAAGATTTGG | |
| | insertion is | ACATGGAGGATAACGATATTATTGAGGCTCACCGCGAACAGATTGG | |
| | indicated by []. | AGGCTCCATTACAAGCCACCATCACCATCATCACGGT | |

Genes

| | | | SEQ |
|---|---|---|---|
| Name | Details | Sequence | ID NO: |
| SUMO | sequence from | GACTCAGAAGTCAATCAAGAAGCTAAGCCAGAGGTCAAGCCAGAAG | 456 |
| | pE-SUMO | TCAAGCCTGAGACTCACATCAATTTAAAGGTGTCCGATGGATCTTC | |
| | | AGAGATCTTCTTCAAGATCAAAAAGACCACTCCTTTAAGAAGGCTG | |
| | | ATGGAAGCGTTCGCTAAAAGACAGGGTAAGGAAATGGACTCCTTAA | |
| | | GATTCTTGTACGACGGTATTAGAATTCAAGCTGATCAGGCCCCTGA | |
| | | AGATTTGGACATGGAGGATAACGATATTATTGAGGCTCACCGCGAA | |
| | | CAGATTGGAGGT | |
| lacI | | ATGAAACCAGTAACGTTATACGATGTCGCAGAGTATGCCGGTGTCT | 457 |
| | | CTTATCAGACCGTTTCCCGCGTGGTGAACCAGGCCAGCCACGTTTC | |
| | | TGCGAAAACGCGGGAAAAAGTGGAAGCGGCGATGGCGGAGCTGAAT | |
| | | TACATTCCCAACCGCGTGGCACAACAACTGGCGGGCAAACAGTCGT | |
| | | TGCTTATTGGCGTTGCCACCTCCAGTCTGGCCCTGCACGCGCCGTC | |
| | | GCAAATTGTCGCGGCGATTAAATCTCGCGCCGATCAACTGGGTGCC | |
| | | AGCGTGGTGGTGTCGATGGTAGAACGAAGCGGCGTCGAAGCCTGTA | |
| | | AAGCGGCGGTGCACAATCTTCTCGCGCAACGCGTCAGTGGGCTGAT | |
| | | CATTAACTATCCGCTGGATGACCAGGATGCCATTGCTGTGGAAGCT | |
| | | GCCTGCACTAATGTTCCGGCGTTATTTCTTGATGTCTCTGACCAGA | |
| | | CACCCATCAACAGTATTATTTTCTCCCATGAGGACGGTACGCGACT | |
| | | GGGCGTGGAGCATCTGGTCGCATTGGGTCACCAGCAAATCGCGCTG | |
| | | TTAGCGGGCCCATTAAGTTCTGTCTCGGCGCGTCTGCGTCTGGCTG | |
| | | GCTGGCATAAATATCTCACTCGCAATCAAATTCAGCCGATAGCGGA | |
| | | ACGGGAAGGCGACTGGAGTGCCATGTCCGGTTTTCAACAAACCATG | |
| | | CAAATGCTGAATGAGGGCATCGTTCCCACTGCGATGCTGGTTGCCA | |
| | | ACGATCAGATGGCGCTGGGCGCAATGCGCGCCATTACCGAGTCCGG | |
| | | GCTGCGCGTTGGTGCGGATATCTCGGTAGTGGGATACGACGATACC | |
| | | GAAGATAGCTCATGTTATATCCCGCCGTTAACCACCATCAAACAGG | |
| | | ATTTTCGCCTGCTGGGGCAAACCAGCGTGGACCGCTTGCTGCAACT | |
| | | CTCTCAGGGCCAGGCGGTGAAGGGCAATCAGCTGTTGCCAGTCTCA | |
| | | CTGGTGAAAAGAAAAACCACCCTGGCGCCCAATACGCAAACCGCCT | |
| | | CTCCCCGCGCGTTGGCCGATTCATTAATGCAGCTGGCACGACAGGT | |
| | | TTCCCGACTGGAAAGCGGGCAG | |
| HIS₆-MBP | | ATGTCATATTACCACCATCACCATCATCACGACTATGATATTCCCA | 458 |
| | | CAAGCATGAAAATCGAAGAAGGTAAACTGGTAATCTGGATTAACGG | |
| | | CGATAAAGGCTATAACGGATTGGCTGAAGTCGGTAAGAAATTCGAG | |
| | | AAAGATACCGGAATTAAAGTCACCGTTGAGCATCCGGATAAACTGG | |
| | | AAGAGAAATTCCCACAGGTTGCGGCAACTGGCGATGGCCCTGACAT | |
| | | TATCTTCTGGGCACACGACCGCTTTGGTGGCTACGCTCAATCTGGC | |
| | | CTGTTGGCTGAAATCACCCCGGACAAAGCGTTCCAGGACAAGCTGT | |
| | | ATCCGTTTACCTGGGATGCCGTACGTTACAACGGCAAGCTGATTGC | |
| | | TTACCCGATCGCTGTTGAAGCGTTATCGCTGATTTATAACAAAGAT | |
| | | CTGCTGCCGAACCCGCCAAAAACCTGGGAAGAGATCCCGGCGCTGG | |
| | | ATAAAGAACTGAAAGCGAAAGGTAAGAGCGCGCTGATGTTCAACCT | |
| | | GCAAGAACCGTACTTCACCTGGCCGCTGATTGCTGCTGACGGGGGT | |
| | | TATGCGTTCAAGTATGAAAACGGCAAGTACGACATTAAAGACGTGG | |
| | | GCGTGGATAACGCTGGCGCGAAAGCGGGTCTGACCTTCCTGGTTGA | |
| | | CCTGATTAAAAACAAACACATGAATGCAGACACCGATTACTCCATC | |
| | | GCAGAAGCTGCCTTTAATAAAGGCGAAACAGCGATGACCATCAACG | |
| | | GCCCGTGGGCATGGTCCAACATCGACACCAGCAAAGTGAATTATGG | |
| | | TGTAACGGTACTGCCGACCTTCAAGGGTCAACCATCCAAACCGTTC | |
| | | GTTGGCGTGCTGAGCGCAGGTATTAACGCCGCCAGTCCGAACAAAG | |
| | | AGCTGGCGAAAGAGTTCCTCGAAAACTATCTGCTGACTGATGAAGG | |
| | | TCTGGAAGCGGTTAATAAAGACAAACCGCTGGGTGCCGTAGCGCTG | |
| | | AAGTCTTACGAGGAAGAGTTGGCGAAAGATCCACGTATTGCCGCCA | |
| | | CCATGGAAAACGCCCAGAAAGGTGAAATCATGCCGAACATCCCGCA | |
| | | GATGTCCGCTTTCTGGTATGCCGTGCGTACTGCGGTGATCAACGCC | |
| | | GCCAGCGGTCGTCAGACTGTCGATGAAGCCCTGAAAGACGCGCAGA | |
| | | CTCGTATCACCAAGTCGTACTACCATCACCATCACCATCACGGCGG | |
| | | TAGTGGCGAAAACCTGTATTTTCAGGGT | |
| luxR | | ATGAAAAACATAAATGCCGACGACACATACAGAATAATTAATAAAA | 459 |
| | | TTAAAGCTTGTAGAAGCAATAATGATATTAATCAATGCTTATCTGA | |
| | | TATGACTAAAATGGTACATTGTGAATATTATTTACTCGCGATCATT | |
| | | TATCCTCATTCTATGGTTAAATCTGATATTTCAATCCTAGATAATT | |
| | | ACCCTAAAAAATGGAGGCAATATTATGATGACGCTAATTTAATAAA | |
| | | ATATGATCCTATAGTAGATTATTCTAACTCCAATCATTCACCAATT | |
| | | AATTGGAATATATTTGAAAACAATGCTGTAAATAAAAAATCTCCAA | |
| | | ATGTAATTAAAGAAGCGAAAACATCAGGTCTTATCACTGGGTTTAG | |
| | | TTTCCCTATTCATACGGCTAACAATGGCTTCGGAATGCTTAGTTTT | |
| | | GCACATTCAGAAAAAGACAACTATATAGATAGTTTATTTTTACATG | |
| | | CGTGTATGAACATACCATTAATTGTTCCTTCTCTAGTTGATAATTA | |
| | | TCGAAAAATAAATATAGCAAATAATAAATCAAACAACGATTTAACC | |
| | | AAAAGAGAAAAAGAATGTTTAGCGTGGGCATGCGAAGGAAAAAGCT | |
| | | CTTGGGATATTTCAAAAATATTAGGTTGCAGTGAGCGTACTGTCAC | |
| | | TTTCCATTTAACCAATGCGCAAATGAAACTCAATACAACAAACCGC | |
| | | TGCCAAAGTATTTCTAAAGCAATTTTAACAGGAGCAATTGATTGCC | |
| | | CATACTTTAAAAATTGATAA | |
| cymR | | ATGAGCCCGAAACGTCGTACCCAGGCAGAACGTGCAATGGAAACCC | 460 |
| | | AGGGTAAACTGATTGCAGCAGCACTGGGTGTTCTGCGTGAAAAAGG | |
| | | TTATGCAGGTTTTCGTATTGCAGATGTTCCGGGTGCAGCCGGTGTT | |
| | | AGCCGTGGTGCACAGAGCCATCATTTTCCGACCAAACTGGAACTGC | |
| | | TGCTGGCAACCTTTGAATGGCTGTATGAGCAGATTACCGAACGTAG | |
| | | CCGTGCACGTCTGGCAAAACTGAAACCGGAAGATGATGTTATTCAG | |
| | | CAGATGCTGGATGATGCAGCAGATTTTTTTCTGGATGATGATTTTA | |
| | | GCATCGGCCTGGATCTGATTGTTGCAGCAGATCGTGATCCGGCACT | |
| | | GCGTGAAGGTATTCTGCGTACCGTTGAACGTAATCGTTTTGTTGTT | |
| | | GAAGATATGTGGCTGGGTGTGCTGGTGAGCCGTGGTCTGAGCCGTG | |
| | | ATGATGCCGAAGATATTCTGTGGCTGATTTTTAACAGCGTTCGTGG | |
| | | TCTGACAGTTCGTAGCCTGTGGCAGAAAGATAAAGAACGTTTTGAA | |
| | | CGTGTGCGTAATAGCACCCTGGAAATTGCACGTGAACGTTATGCAA | |
| | | AATTCAAACGT | |

Modifying Enzymes

| | | | SEQ |
|---|---|---|---|
| Name | Details | Sequence | ID NO: |
| albA | Amplified | ATGTTTATAGAGCAGATGTTTCCATTTATTAATGAAAGTGTAAGAG | 461 |
| | from genome | TTCACCAGCTTCCTGAGGGCGGCGTGTTAGAAATCGACTACTTGCG | |
| | | CGATAATGTCTCCATTTCTGACTTTGAGTATTTGGATCTCAACAAA | |
| | | ACGGCTTACGAGCTCTGCATGCGCATGGATGGCCAAAAAACAGCTG | |
| | | AGCAGATTTTAGCTGAGCAATGTGCAGTGTATGATGAATCACCGGA | |
| | | AGATCATAAAGATTGGTATTACGACATGCTCAACATGCTCCAGAAC | |
| | | AAGCAGGTTATTCAGCTTGGAAACCGGGCCAGCCGCCATACAATCA | |
| | | CCACGAGCGGAAGCAATGAATTTCCGATGCCCCTGCACGCCACCTT | |
| | | TGAACTGACGCACCGCTGTAATTTGAAATGCGCCCACTGTTATTTG | |
| | | GAAAGCTCACCTGAAGCGCTCGGCACCGTGTCGATTGAGCAATTCA | |
| | | AAAAAACGGCTGATATGCTGTTTGATAACGGTGTATTGACATGCGA | |
| | | AATCACAGGTGGAGAAATTTTTGTCCATCCAAACGCCAATGAGATT | |
| | | CTTGACTATGTGTGTAAAAAGTTCAAAAAAGTCGCTGTCTTAACAA | |
| | | ACGGAACACTCATGCGAAAAGAGAGCCTGGAGCTTTTGAAAACTTA | |
| | | CAAGCAAAAAATCATCGTCGGCATTTCTCTAGATAGTGTCAATTCC | |
| | | GAGGTCCATGACTCCTTTAGAGGGAGAAAAGGCTCTTTTGCCCAAA | |
| | | CTTGTAAAACGATAAAATTGTTGAGTGACCACGGTATATTTGTCAG | |
| | | AGTCGCTATGTCTGTATTCGAAAAAAACATGTGGGAAATCCACGAT | |
| | | ATGGCCCAAAAGGTTCGGGATCTCGGGGCGAAGGCGTTTTCTTACA | |
| | | ATTGGGTTGACGATTTCGGAAGAGGCAGGGATATTGTCCATCCAAC | |
| | | GAAAGACGCCGAGCAGCACCGCAAGTTTATGGAATACGAGCAACAT | |
| | | GTGATTGATGAGTTTAAAGATCTGATTCCGATTATTCCCTATGAGA | |
| | | GAAAACGCGCGGCAAATTGCGGCGCTGGCTGGAAGTCCATTGTGAT | |
| | | CAGTCCGTTCGGCGAAGTACGTCCTTGCGCCCTCTTTCCAAAGGAA | |
| | | TTTTCATTGGGAAATATTTTTCATGATTCCTATGAAAGCATCTTTA | |
| | | ACTCCCCTCTCGTCCATAAACTGTGGCAAGCGCAAGCGCCGCGGTT | |
| | | CAGCGAACATTGCATGAAAGACAAATGCCCGTTCAGCGGCTATTGC | |
| | | GGAGGCTGTTACTTAAAAGGGCTGAACTCTAACAAATATCACCGGA | |
| | | AAAACATTTGCTCTTGGGCGAAAAATGAACAATTAGAAGATGTGGT | |
| | | CCAGCTTATT | |
| albsB | Codon | ATGCCTGAGCTTCCCCGTTTCGCGACGGCCCCTCGTCACGTGCGTG | 462 |
| | optimized | CCCTGGATTTCGGTCATGTTCTGGTCCTGATCGATTACCGTTCCAA | |
| | | TCACGTCCAGTGCCTGCTTCCGGCAGCCGCAGCCCATTGGACAGCC | |
| | | ACAGCGCGTACCGGCCGCTTGGACACCATGCCGGCAGCGCTGGCCA | |
| | | CCCAGTTACTGACATCGGCGTTATTAGTACCGCGGCCGACCGCAAC | |
| | | ACCGTGGACGGCACCTGTAGCGGCACCACCTGCTCCACCGTCATGG | |
| | | GGTGGATCCGAGCATCCTGCCGGGACATCACGCCCTCGGGCACGTC | |
| | | ATCGGCACTCAACCACGGCTGCGGCGGCGCTGGCATGTGTGCTGGC | |
| | | GATTAAGGCAGCAGGCCCAACCCGCTATGCTATGCAGCGCTTGACC | |
| | | ACGGTCGTGAAGGCAGCCGCTTCTACGTGCCGTCGCCCGGCAACGC | |
| | | CAGCACAAGCGACGGCTGCTGCGCTTGCGGTCCGTCAGGCATGCTG | |
| | | GTACTCGCCAGCGCGTACAGCCTGTCTGGAAGAATCCGCCGCGACT | |
| | | GTCATTTTACTCGCTACCCGGCGTTTGAGTTCGACATGGTGCCATG | |
| | | GAGTAGCTCCCGATCCGATTCGCCTCCATGCCTGGGTGGAAACTGA | |
| | | GGATGGGACACCTGTAGCAGAGCCAGCCTCGACCCTTGCGTACACC | |
| | | CCGGCCTTAACCATTGGAGGCCACCATCAACACCAGCCT | |
| albsC | Codon | ATGATCTTTGGTGGATTTTCGACGACCCGTGAAGTTCGTCAACGCC | 463 |
| | optimized | CTGGTAATGCCGAGTTTATTGCTACGGACTCGCCTATTTGGCGCCT | |
| | | CGGTCGTAGTCCAGCTCGTTGCGTGGCTGCGGACCATGGACAGCGT | |
| | | CGCCTGGTAGTGTTGGGAGAATGCGGGGCAACGGATGGCGAATTAT | |
| | | CTCGCCTGGCGACCGCGGGGCTGCCCACGGATATTACCTGGCGCTG | |
| | | GCCAGGCGTGTACGTGGTGGTCGAAGAACAACCGGAACGTACGGTG | |
| | | CTGCACACTGATCCAGCAGCTGCACTCCCGGTATACGCAACCCCTT | |
| | | GGCAAGGCGGCTGGGCATGGTCAACCAGCGCGCGCATCCTGGCACG | |
| | | TTTAACAGAAGCTCCAATTGATGGTCAACGCCTGGCATGTTCAGTG | |
| | | CTGGCCCCGTCTGTTCCGGCTCTGAGCGGTACCCGCACATTCTTTG | |
| | | CGGGTATCGAACAATTGGCCCTGGGTTCGCGTATTGAACTGCCGGT | |
| | | GGATGGGTCCCGTCTGCGTGTTACGGTACGTTGGCGCCCGGATCCA | |
| | | GTCCCGGGAGAACCATATCATCGCTTGCGCACAGCGTTGACCGAGG | |
| | | CGGTCGCCCTGCGTGTCAACCGCGCACCAGACCTGTCATGCGACCT | |
| | | CTCGGGCGGCCTCGATTCCACGTCACTGGCAGTCCTGGCGGCTGTG | |
| | | TGCTTACCGGAGTCCCACCATCTGAATGCTATCACGATTCATCCGG | |
| | | AGGGCGATGAAAGTGGCGCGGACTTACGGTATGCGCGCTTGGCAGC | |
| | | TGCGCACCACGGGCGTATTCGCCACCACCTTCTCCCCCTTGCGGCA | |
| | | GAACACCTGCCGTATACTGAAATTACGGCGGTGCCCCCTACCACCG | |
| | | AACCGGCACCTTCAACATTAACGCGTGCACGCCTCGCGTGGCAGTT | |
| | | AGATTGGATGCGCCAGCACTTAGGCAGCCGCACCCATATGACTGGC | |
| | | GATGGAGGCGACAGCGTACTGTTCCAACCGCCGGCACATCTGGCGG | |
| | | ATCTCCTGCGGCATCGGCAGTGGCGTCGGACTTTGTCGGAAAGTTT | |
| | | GGGATGGGCACGCCTTCGCCATACGTCTGTTTTACCCTTACTGCGT | |
| | | GGAGCAGCAACTCTTGCACGTACATCACGTCGGTCGGGCCTCCAGG | |
| | | ATCTCGCACGCGCATTGGCGGGTGCAGGTCAGCAGGGCGATGGTCG | |
| | | TGGCAATGTGAGCTGGTTCGCACCATTACCGCTGCCTGGCTGGGCG | |
| | | ACCCCAACCGCTCGTCGCTTACTGCTTGATGCAGCCGATGAAGCTA | |
| | | TCTCGACCGCGGATCCGTTACCGGGACTGGATACGTCGCTGCGCGT | |
| | | ACTGATCGATGAAATTCGCGAAGTCGCCCGCACGGCAGCGGCAGAT | |
| | | GCCGAACTGGCGGATGCTCACGGAACGACTCTGCATAACCCATTTC | |
| | | TCGATCCGCGCACTATTGATGCAGTCCTGCGCACGCCAATCGCACA | |
| | | TCGCCCGGCGGTCCACTCGTATAAGCCAGCGCTGGGGCATGCAATG | |
| | | CAGGATTTGCTCCCGGGTGCAGTCGCTCGGCGCTCAACTAAAGGCT | |
| | | CTTTTAACGCCGATCATTATGCGGGGATGCGTGCAAATCTGCCAGC | |
| | | ATTGACAGCGCTGGCAGATGGCCACCTGGCCGACCTGGGTTTGTTG | |
| | | GAGCCGACGCGCTTCCGCAGTCATCTTCGCCAAGCCGCCGCGGGCA | |
| | | TTCCGATGCCGCTTGCGGCGATCGAACAGGCGCTGTCTGCCGAAGC | |
| | | ATGGTGTCATGCACATCACGCCACCCCAAGCCCTGCCTGGACAACG | |
| | | CAGCCACCGGAACACCCGCATGCC | |
| albsT | Codon | ATGAGCACGTCCCCCGAACAGACCCTCTGGATCTCAACTGATACCT | 464 |
| | optimized | GTGGTCTGGGGCCGTATCGCGCTGACTTGGTGGATACCTATTGGCA | |
| | | GTGGGAACAAGACCCAACATTGCTTGTAGGCTACGGTCGTCAGTCA | |
| | | CCGCAGTCACTGGAGGCCCGCACGGAAGGTATGGCCCACCAATTGC | |
| | | GTGGCGATAACATCCGTTTCACTATCTATGATCTGTGCAGCAGTAC | |
| | | ACCTACCCCGGCGGGCGTGGCAACGCTGCTGCCCGATCATAGCGTC | |
| | | CGTACTGCCGAGTATGTTATTATGCTTGCGCCTGAAGCACGTGGGC | |
| | | GTGGCTTAGGAACCACCGCCACGCAGCTGACGTTAGATTATGCGTT | |
| | | TCACATCACCAATCTGCGGATGGTCTGGTTGAAAGTACTGGCGCCG | |
| | | AACACCGCGGGCATCCGTGCGTATGAGAAAGCTGGCTTTCGTACAG | |
| | | TTGGAGCGCTTCGCGAAGCCGGCTATTGGCTGGGGAAGGTCTGCGA | |
| | | TGAGGTACTGATGGATGCCTTAGCGAAAGACTTCACGGGTCCAAGT | |
| | | GCAGTCCACGCAGCATTAACTGGCGCCAGCGGTCGCCAGCTGCGCC | |
| | | GTGCACCT | |
| amdnC | Codon | ATGAACGTTCTGATTATAACGCATTCCCACGATAACGAGAGCATTT | 465 |
| | optimized | CATTGGTAACCCAAGCCATTGAATCCCAGGGTGGTAAAGCATTTCG | |
| | | CTTCGATACCGATCGTTTTCCGACGGAAGTCCAGCTGGACATCTAT | |
| | | TACTCAAATACAGAGAAATGCGTGCTGGTGGCTGACGATCAAAAAC | |
| | | TGGATTTAAATGAAGTAACCGCGGTCTGGTATCGCCGCATTGCGAT | |
| | | CGGTGGCAAAATCCCGCCCACGATGGATAAGCAACTTCGTCAGGCC | |
| | | TCGATTCAGGAGAGTCGTGCTACAATTCAAGGCATGATAGCGAGCA | |
| | | TTCGCGGCTTTCACCTTGACCCAGTGCCGAACATTCGTCGCGCTGA | |
| | | AAATAAGCAACTGCAGCTGCAGGTTGCCCGCAAAATCGGACTGGAT | |
| | | ACCCCACGCACTCTCACCACTAATAATCCGCAGGCCGTGAAGGAAT | |
| | | TTGCGGCAGAATGCCAGCAGGACGTAATCACCAAAATGCTGAGTAG | |
| | | TTTTGCGATTTATGATGAGAAAGGCGGAGAACAGGTGGTTTTCACC | |
| | | AATCCCGTGAAATCTGAGGATCTGGAAAATTTAGAAGGTCTGCGCT | |
| | | TTTGCCCTATGACGTTTCAAGAGAAAATCGCAAAGGTTCTGGAGCT | |
| | | CCGGATCACCATCGTGGGTAAGTCAATTTTAACGGCTGCGGTGAAT | |
| | | TCACAGGCCCTGGACAAATCCCGTTATGATTGGCGCAAGCAGGGCG | |
| | | TAGCATTACTGGATGCATGGCAGACCCATACGTTACCCCAGGACGT | |
| | | GGCTGATAAATTGCTTCAACTGATGGCCCATTTCGGGTTAAACTAT | |
| | | GGAGCCATTGACGTGATTCTGACCCCGGATAATCGCTATGTGTTCT | |
| | | TGGAGGTCAATCCGGTGGGCGAATTCTTTTGGCTTGAGCGTTGCCC | |
| | | AGGTCTGCCGATTAGTCAAGCTATTGCTAAAGTGCTGCTTTCTCAT | |
| | | ATA | |
| atxB | Codon | ATGTACGAGCTGAATGATGGCGTAGGTTTGGCCCTCGTGGATCAGC | 466 |
| | optimized | ATCCGATTTTTCTGGACCTGAAAACAGACCGTTACCTGTCGTTGAG | |
| | | TCCAGATGGGGCAGCAGTCCTGCTGGGAGCAGCGCCAGCCACCAAA | |
| | | GAGAGTCCACTGTTTCTCGGATTAGAATCCATTGGCTTGGTCAAAA | |
| | | ACGGTCCGTCAGGCCTTAAGCCTTGCCAAATTGCCGTAGCCACTGG | |
| | | GTCTGCACCGCCCCGTAAGGTGCAATTCGAGTCGTTGTCACTCCTG | |
| | | CTTTTGCGCTTAATTCGTGCACGTCTGGATCAACGTGCTCTTTTGA | |
| | | AGCGTGTGACCGACTTAAAGAAGGCCGGCACCATTGCCCAGACGAA | |
| | | GAACCGTGACTGCGCCTTGTCATTATTAGGTAGCGTGGAGACTGAG | |
| | | GCAAAGGCTTGTCGTACCCTTTTAAGTAGTACAGACAAATGCCTGC | |
| | | CCGACGCATTCGCAATTGCAACGCACCTGCGCCGTCGCGGAGTAGA | |
| | | CGCCAAGTTAGTTTTCGGTGTGCGCCTGCCATTCGCGGCACATGCC | |
| | | TGGGTCCAGGTAGATGATATTGTAGTGGGTGATCGTCCCGACCGTA | |
| | | TCCTTGCGTTCACCCCCATCTTAGTCGTT | |
| atxC | Codon | ATGCGCTATGTCGCGTCTTTCTTTGTTCGCGGACATGTCAGCACAC | 467 |
| | optimized | CAGCACTGCGTCACCCAGAGCCAAAGGGTTTCGCTTATGCAAAAGT | |
| | | CAGTGGCGGACTGAGCGTATGGAGCGATGCGCCGATTCGTCACCGT | |
| | | GCGCCCCTTATTACAGTGGGCGCGGTGTTCGATCGCGCGTCTTTTA | |
| | | AAGGGCTGGATTGCGACTTATCAGGTCTGCGTCAGGATGGTCTTAA | |
| | | TACATTGAAAGCGGAAACGTTCGGACCCTACCTGGCGTTAGAGGTT | |
| | | GCCGATAACGGCACCCTTCGCGTTTATCGCGATCCGTCAGGCGGCG | |
| | | CGCCTTGCTATTACCTGCAGACCGAGGACGGCTTCTGGCTTGCAAG | |
| | | CGATGCTGATTTGTTATTCACTCATTCGGGCGTACATCCATCAGTA | |
| | | AGCTTACCGGGACTGATTGAACACTTGCGTCGTCCAGAGTTCCAAA | |
| | | ATGAGGGCACATGCTTAAACGTCAAGCAAGTACGCCCTGGGGAGCA | |
| | | GGTTGATTTATCGCTCTCGGGCGAGGTCCGTGCCTGTTTGTTCCCG | |
| | | CCTGCATCATCCCTGCGCCCGCCTGAGTTGCACCGCGCATACGATG | |
| | | ACATTAAGGCTGAGCTGCGCGCTCTGATTTTACGCAGCATTAAGGC | |
| | | CTATGCCAGTGATTTCCCTCACGTTGTTGTTAGCTTCAGCGGTGGT | |
| | | CTGGATAGCAGTGTTGTTGCGGCCGGCTTAGCGCAAACTTCCACTA | |
| | | AGGTCCTGCTTCACACCTTTAAGGGCCCAGATGCCAAAGGGGACGA | |
| | | GACTGCCTTCGCCGCAGAATGCGCGGCATATCTGGGTTTAAGCTTA | |
| | | GAGATTGATACTCTCAGTATCGATGACGTTGATCTGTCGGCAACTA | |
| | | TTTCCCCGCACCTGCCGCGCCCCAGCACATCATTCTTCTTGCCATC | |
| | | ACTGCTGCGCGGTTTCTCTACCTCGAGCCAAACGCGCACAGGCGGG | |
| | | GCAATCTTTTCGGGAAACGGCGGTGACTCGGTCTTTTGTTTCATGC | |
| | | ATAGCGCGACCCCGCTGGCCGATTTGATGTGTCGTCCGTCAGGTCT | |
| | | TACGCCGTTCATGCAAACATGGGCCGACGTGCAAAAGCTTACCCGT | |
| | | GCCTCAGCGACCGAAGTGCTGCGTCGCGCGTTAAAGACAGCCATGG | |
| | | CGCGTGGCTACATCTGGCCTGAATCCAATCTCCTCTTGTCCCGCGA | |
| | | CACAAGCTCGAGCCGTTTAACACCTGACTCCGTTCTGTCGAGCCTT | |
| | | GAGGGGATTCTGCCCGGTCGCTTGCGTCACCTCGCCCTGATTCGTC | |
| | | GTGCTCACAACACCTTCGAGCCATTCGCCCCTTGGCGTACGCCGCC | |
| | | AGTCGTTCACCCTCTCATGGCCAAGCCGATTCAAGCCTTCTGCCTT | |
| | | TCTCTTCCTTCATGGATGTGGGTCAGCGGTGGTAAAGACCGCTCGC | |
| | | TCGTGCGTGACGCGTTCGAAGGATTACTTCCAGATTCAGTGCGCCT | |
| | | TCGTAAATCAAAGGGAAGTCCTGCAGGCTTTCTGCATGCGCTGTAC | |
| | | CGCGCCAAGGGTCGTCAAATGATTGAGCGTATCCGTCACGGTTACC | |
| | | TGCGTCGTGAGGGGATCATCGATATCTCTACTGGCCCGGACGCATT | |
| | | GTTCTCGGAAGGGTTCCGCAATCCGCGTGTAATGCACCGTTTCTTT | |
| | | GAGCTCGCCGCAACTGAGGTGTGGATCGATCACTGGCGCAACTGGC | |
| | | GCCGCCCCCGCACA | |
| bamB | Codon | ATGGAAGGGTTGTATCAGCTGAAAGTGCATAGTCGTATACACAAAC | 468 |
| | optimized | TGCAAAATAATATCGCAATAGGTAGCATGCCGCCTCACGCGCTGAT | |
| | | CATCGAGGATGCCCCCGAATATTTGTCAAACGTTCTGCGCTTCTTT | |
| | | AGTAGCAAAAAGACTATAAAAGAAGCTGAAGTGTACCTGTCGGATA | |
| | | ATACGAATCTGAGCTCCAATGAGATCAACCTGTTGTTAGGTGATCT | |
| | | GATTGAGAACGAGATTATCGTAAAGCAAAACTACGACTCGAATAAT | |
| | | CGGTACAGTCGACACAGTCTGTATTACGAGATGATTGATGCCAACG | |
| | | CTGAAAACGCGCAGAAAATTCTGGCAGAGAAAACAGTGGGCCTCGT | |
| | | TGGGATGGGCGGGATTGGTTCCAATGTAGCCATGAATCTCGCAGCC | |
| | | GCCGGTGTTGGCAAACTGATCTTTAGTGATGGCGATACCATAGAAC | |
| | | TGTCTAATTTAACGCGACAGTATCTTTACAAAGAGGATCAGGTGGG | |
| | | CTTGAGCAAAGTAGAGAGCGCCAAAGAACAACTGCAATTACTGAAT | |
| | | AGCGAAGTCGAGCTTATCCCGGTTTGCGAAAGTATCTCTGGTGAGG | |
| | | AACTGTTCGACAACCATTTCTCCGAATGCGATTTCGTCGTACTGTC | |
| | | CGCCGACTCTCCGTTCTTTGTTCACGAATGGATTAACAATGCCGCG | |
| | | TTGAAATATGGCTTCTCCTACTCTAACGCAGGATATATCGAAACCT | |
| | | ATGGCGCGATCGGTCCACTGGTGATACCTGGGGAAACTGCCTGCTA | |
| | | CGAATGCTATAAAGACAAGGGCGATCTTTACTTGTACTCCGACAAC | |
| | | AAGGAAGAATTTTCTGTGAACCTGAATGAATCATTCCAAGCACCGA | |
| | | GCTATGGACCGCTTAATGCGATGGTTAGTTCCATTCAGGCGAATGA | |
| | | AGTGATACGCCACCTCCTCGGACTTAAAACCAAAACGTCCGGCAAA | |
| | | CGGCTGCTGATCAACAGTGAAATCTACAAAATCCACGAAGAGAACT | |
| | | TCGAGAAGAAGAACAACTGCCTGTGCTCGGATATTAAGGGCGAGAA | |
| | | GCTGTCGAAGAACACCCTTAACTCCGATAAAGAGCTGCACGAAGTG | |
| | | TATATCGAAGAACGCGAATCGGATTCTTTCAACTCCATTCTCTTGG | |
| | | ATAAAACCATGAGCAAGCTGGTAAAAATTAACAAAGAGGAGACAAA | |
| | | AATCCTCGACATTGGTTGCGCTACCGGCGAACAGGCTCTGTATTTC | |
| | | GCGAATAAAGGTGCTAAGGTGACCGCTGTCGACATTTCAGACGATA | |
| | | TGTTGAAGGTGCTGGACAAGAAAGCAAGCAACATTAACGCGGGGAG | |
| | | TATCAAAACCATGCGTGGTAATATCGAATCCATCGAGGTGAATGAC | |
| | | ACTTTTAATTACATCGTCTGTAACAACATCCTTGATTACCTGCCGG | |
| | | AGATCGACCGCACGCTGAGAAAACTTAACATGTTTTTGAAAAATGA | |
| | | CGGGACGCTGATTGTGACGATTCCCCACCCCGTGAAGGATGGTGGA | |
| | | GGGTGGCGGAAAGATTATTATAACGGCAAATGGAACTACGAAGAGT | |
| | | TTATCCTGAAGGATTACTTCAACGAGGGTCTGATCGAAAAGAGCCG | |
| | | CGAGGACAAAAATGGGGAAACGGTGATCAAAAGCATTAAAACGTAC | |
| | | CACAGAACCACCGAAACCTATTTCAATAGCTTTACTGACGCTGGCT | |
| | | TCAAGGTAGTATCTCTGCTGGAACCGCAACCGCTTTCAACTGTTTC | |
| | | AGAGACTCATCCAATTCTGTTCGAAAAGTGTTCGCGCATTCCGTAC | |
| | | TTTCAAGTTTTTGTGCTCAAGAAAGAGGATCGCCACGCCATT | |
| bsjM | Codon | ATGATCAAAAATGTAAACCTCAAAGAGGCCATTAAAGGTTTGACCG | 469 |
| | optimized | TATCAGAACGTTATGACACTCTGAAAAATTCGGGAGTCAACCTGAA | |
| | | TCTGAACATTTCGGCTTTGGAAGAGTGGCGCAACCGTAAGAATCTT | |
| | | TTAGCCGATGAGGACTTTACGGAGATGCTGACGGTGCTGGAATATG | |
| | | ACCCGGTGTATTTTAGCCACGCGATTAACGAGAACATCGAAGAACA | |
| | | TATCGATATCTACAAGAGCAAAATTCTGGGGGAAAACTGGTTTATC | |
| | | GTGCTGAACGATATTCTGGACGAGCTCGATAATCCCATCGAATACA | |
| | | AGAAAGAGATGAATCACAGCTACCTCCTGCGTCCGTTCTTGCTCTA | |
| | | CGCCGAAAAGGAGATGAACAAATACATTGTCAATCGTAAGGAGTTA | |
| | | CTTCCGGTGGAACCCCAGGTCATCCAACAGATCATGGAAAATTTGG | |
| | | CCTCCAAACTGTTCGCCGTTTCTGTGAAAAGCTTTGTCCTGGAGCT | |
| | | GAATATTTCGAAATTGAAGGACGAACTGGCCGGCGAAACACCGGAC | |
| | | GAACGCTTTCACTCATTTATTCGTTTGATGGGTGAGAAAACGCGCC | |
| | | TGGTGGACTTTTACAACGAATATATCGTTCTGAGTCGTATTCTGGT | |
| | | GAACATCACGATCTTATTCGTCAACAACATTATTGAGCTGTTTGAG | |
| | | CGCCTGCAGGAATCCAAGCTGGATATTGTTAAGAAACTTGGCGTGC | |
| | | AGGAGGAGTTCAAAATCAGTAATATTAGCATTGGCGAAGGTGATAC | |
| | | ACATCAGCAAGGACGCTCGGTTATCGTTCTTACGTTCGTGAGTGGA | |
| | | AAGAAAGTGGTGTATAAACCAAAAAATCTGAAAGTTGTTTCTGCTT | |
| | | ATAATTCTTTAATTGACTGGATCAACAATAAAAATAATATTCTGAA | |
| | | AATGCCTTCGTATAACACATTGATTTATGATGATTTCGTGATCGAG | |
| | | GAGTTTGTCGAGAAACGTGACTGCAAAAGTATCGAGGAGGTCAAAA | |
| | | AATATTATATTCGTTATGGGCAAATTTTGGGGATTATGTATATCTT | |
| | | AAATGGGAACGATTTTCATATGGAAAACCTGATTGCCTCGGGTGAA | |
| | | TATCCGATCATTGTTGACTTGGAAACGCTGCTTCAGAACATTATCA | |
| | | ATTTTAAAAACAAACCATCAGCGGACTTGATCACCACCAAAAAGAT | |
| | | GCTTAACCTGGTAAACAGTACTCTGCTGCTCCCTGAAAAACTTCTG | |
| | | AAGGGCGACATCACGGACGAAGGAATCGACATGTCAGCCTTGGCAG | |
| | | GGAAAGAACAACACTTGGAACGCCGCGAATACCAGTTGAAAAACCT | |
| | | GTTCACCGACAACATGGTTTTTGATCTCGAAAAAGTGAAAATCGAA | |
| | | GGTGCGAACAACATCCCGAAATTAAACGGTGAAAACGTTGACTACA | |
| | | GCACCTATATTGATGAGATTGTGGTTGGGTTCGAAAATATCTGTAA | |
| | | CCTGTTCATTCAATATCGCGACGAGTTACTGCATTCCGGCATCCTG | |
| | | GAGGAGTTTAAAGATGTGAAGGTTCGTCATGTGCTTCGCAATACGG | |
| | | TTGTTTATGCTAAGATGCTGGCGAATACATATCATCCAGATTACCT | |
| | | GCGTGATTCGTTGAATCGCGAACAGGTTCTTGAAAACATTTGGGTG | |
| | | CATCCGTTTGAGCGCAAAGAATTCATTAAGAGCGAGATGGAAGATA | |
| | | TCCTCAACAACGACATCCCGATCTTTTTCTCATACGCGTCGTCTAA | |
| | | GGATATTATCGATTCGAATGGCAAACTGCACAAAAACGTTATGGAA | |
| | | ATTTCGGGTTACGAACGTTTTACCACCAAACTGAAGGAACTGAATC | |
| | | CCTTTCTGATTGAACAGCAGGTGAGCGTTATTAATATTAAAACCGG | |
| | | CCGCTATGGGGATAAGAAATTCGAAAAAAATTATAGCGTGCGCGAC | |
| | | GTTGCAACGGAGAAAAAAGATAATCCGATTGATTTCCTGCAGGAGG | |
| | | CAATGAATATCGGCGATAAAATTTTGGAACATGCTATCATCTGTGA | |
| | | TGAGACCAAAACGATTTCGTGGCTTACCATTAACAACCATCATGAT | |
| | | AAAAATTGGGAAATTGGGCCTATTTCCGGTGAATTTTATGATGGTC | |
| | | TGGCGGGAATTTCACTCTTCTACCACTACCTCTATAAAAAATCCCA | |
| | | CAATGTCGAGTATAAAAAAATTCGTGATTACGCGTTCAACATGGCG | |
| | | AAAGTCAAAGCCCTGTCACTGAAATACGATAGTGGCTTGACCGGTT | |
| | | ACGCTTCCTTGCTGTATACGGCACACAAGATTGTTCAGGATGAACC | |
| | | GCGGAAGCAATACAAAGACGTGATCAACGAAGTGTTCAAGTACATT | |
| | | GATGAGAGCAAAGTCGTGACCGCTAAGTATAACTGGTTGCATGGCA | |
| | | CTGCCTCTATTATTCATGTGTTATTGAACCTCTACGAGGACTCTCG | |
| | | TGATATGGCGTACCTGACTAAATGTATTCAGTACGGCAAATATTTG | |
| | | GTCAAGCAAATCAAAGAACACAAGGATATGCTTGCGCCTGGCTTTA | |
| | | GCCAGGGCATCTCTTCGGTCATTATGGTTCTGGTGCGCTTAAGTAA | |
| | | AAAGTGTGAAGTCGAAGAATTTCTCGAATTAGCTCTGGAATTAATG | |
| | | GAAATGGAACGCAACAAACTGGGAAACCTTTCTGAATCAAACTGGC | |
| | | TGAACGGCTTGGTGGGCATTGGCTTATCACGTATCAAACTGAAAGG | |
| | | ACTGGATTCCAACTTACAGGTCGACAACGACATCGAACTCGTCCTG | |
| | | GATGGCGTCATGAACAGCTTGTACTCAAAAGATGATACTTTGAGCT | |
| | | GTGGTAACTCTGGCACAGTGGAATTGTTCCTGAGTCTGTTTGAACA | |
| | | GACGAAAAAGAAAGAGTATCTGGATATGGCGAAAGCAATCTGCGGG | |
| | | AAAATGATCGAAGAGAGTCGCATCTCCTTTGAGTATCAGACAAAGA | |
| | | GTCTGCCGGGTTTAGAACTGGTGGGCCTCTACTCTGGCTTAGCCGG | |
| | | AATTGGTTATCAATTCTTACGTATCTCGGACGTTGAGGATATTGCG | |
| | | AGCATTGCTACCTTAGAT | |
| capB | Codon | ATGCAGCCAGACCTGGAGGTTGTTGATGTTCGTCGCGGCGAGTCGT | 470 |
| | optimized | TCAAGGCATGGTCGCATGGGTACCCATATCGCACTGTTCGCTGGCA | |
| | | CTTCCATCCTGAGTTTGAAGTACATCTGATCGTGGAAACCACCGGC | |
| | | CAGATGTTTGTGGGTGATTATGTCGGAGGCTTTGGTCCGGGTAATC | |
| | | TGGTCCTGATGGGTCCCAATCTGCCTCATAATTGGGTGTCTGACGT | |
| | | TCCTGAGGGTAAAACCGTTGCAGAGCGTAACCTTGTTGTTCAATTT | |
| | | GGGCAAGCGTTCGTTTCCCGTTGCGAGGATTCCTTAACGGAGTGGC | |
| | | GTCACGTGGAAACGTTACTGGCGGATGCGCGGCGTGGCGTGCAATT | |
| | | TGGGCCGCGCACCTCTGAGGCCATTAAACCTCTGTTCGCGGAACTG | |
| | | ATTCACGCGCGCGGCCTGCGTCGCATTGTGCTGTTTCTGTCTATGC | |
| | | TGCAAATCCTCGTCGATGCAACGGATCGCGAACTGCTGGCATCTCC | |
| | | AGCTTATCAGGCGGATCCTTCGACATTTGCAAGCACGCGCATTAAT | |
| | | CATGCGCTGGCCTACATTGGAAAGAATCTGGCGAACGAGCTTCGTG | |
| | | AAACAGATTTAGCACGGCTGGCCGGACAGTCTGTTTCCGCCTTCTC | |
| | | TCATTATTTTCGTCGTCATACCGGCCTGCCTTTCGTGCAGTACGTT | |
| | | AATCGCATGCGTATCAACCTGGCCTGTCAGCTTCTGATGGACGGGG | |
| | | ACGCATCGGTGACAGATATTTGTTTCCGTAGCGGTTTTAACAACCT | |
| | | GTCCAATTTTAACCGTCAGTTTCTGGCAGTGAAAGGTATGTCACCC | |
| | | AGTCGGTTCCGTCGCTACCAGGCTCTCAACGACGCGTCACGTGATG | |
| | | CGAGTGAAGCGGCTGCAAAACGCGGCGCAGGTATTGCAGGTGCACC | |
| | | GGCAATCGTTCCAGCGGCTCAAGCACGTGGCGAGGCACGCCCAATT | |
| | | CCTGAAGTGCTGCTTAGCGGC | |
| capC | Codon | ATGATGCTGACGGCGAGCTCCACACCGGCATCCGGTAATCCAGCTG | 471 |
| | optimized | CCCGTGCATTGCGCGCCGCTGCCTTTGCACTGGCCTTAGGCGGAGC | |
| | | ATGCGTTGCGCATGCCGCACCTCTGCGGATTGGCATGACATTCCAA | |
| | | GAATTGAATAACCCGTATTTTGTGACCATGCAGAAAGCACTGAACG | |
| | | AAGCCGCGGCGAGCATTGGCGCGCAAGTGATTGTAACAGACGCACA | |
| | | TCACGACGTGTCAAAACAGGTATCAGACGTTGAGGATATGCTGCAG | |
| | | AAGAAAATTGATATTTTACTGGTGAATCCAACCGACTCCACGGGCA | |
| | | TCCAGAGTGCGATTGTTTCCGCAAAGAAGGCTGGCGCCGTGGTCGT | |
| | | GGCGGTCGATGCCAATGCCAATGGCCCGGTGGATTCCTTCGTAGGG | |
| | | TCCAAGAATTTTGATGCCGGCGCTATGTCATGCGAGTACCTTGCGA | |
| | | AAGCGATCAACGGCGGCGGCGAAGTGGCCATTCTGGATGGCATCCC | |
| | | GGTCGTCCCAATCCTGGAACGTGTCCGCGGCTGCCGCGCGGCACTG | |
| | | GCCAAATTCCCGAATGTGAAAATTGTCGACGTTCAGAATGGAAAAC | |
| | | AGGAACGTGCGACAGCGTTAACGGTAACCGAGAATATGATCCAGGC | |
| | | GCACCCGAAACTGAAAGGTGTGTTTAGTGTAAACGACGGCGGGTCA | |
| | | ATGGGCGCTTTGAGCGCCATTGAAGCGAGCGGCAAAGATATCCGCC | |
| | | TCACGTCCGTAGATGGTGCCCCAGAGGCGGTGGCGGCGATTCAAAA | |
| | | GCCGAACTCCAAATTTATTGAAACAAGCGCTCAATTTCCGCGCGAC | |
| | | CAGATCCGTTTAGCGATTGGTATTGGCCTGGCCAAGAAATGGGGCG | |
| | | CGAACGTGCCAAAAGCGATTCCAGTCGACGTGAAACTGATTGACAA | |
| | | AGGGAACGCGAAAACCTTTAGTTGG | |
| cinX | Codon | ATGGCTCTCAAAACCTGCGAAGAATTTCTGCGCGATGCGTTAGATC | 472 |
| | optimized | CGGATCGCTTCGGCCGCGAGATGAAGGCAGTAACAGAAATTCCCGA | |
| | | GATCGTTAAACTCGGCCATCGTCATGGTTATGGATTTACTGCCGAA | |
| | | GAATTTCTGACCAAAGCTATGAGTTTTGGTGCTCCGCCGGCAGGAG | |
| | | CAGCAGCACCTGGCGAATCAGCCAGCGTTCCTGGCCAGAACGGTTC | |
| | | CTCCCCCGGACACGCTGCGCGTGCAGCTATGGCTGGTCCAGAAGCA | |
| | | GGGGCCACCAGCTTTGCCCACTATGAATACCGTCTGGATGAGCTGC | |
| | | CGGAATTCGCCCCCGTTGTGGCCGAGCTTCCGAAACTGAAAGTCAT | |
| | | GCCGCCTTCCGTGGGACCTGATCGGTTTGCAGCACGCTACCGTGAT | |
| | | GAAGATATGCGCACAATTTCAATGAGTCCGGCGGATCCGGCTTACC | |
| | | AGGCTTGGCACCAGGAACTGGCGGGTCGTGGTTGGCGCGATGCAGA | |
| | | AGATACGGCTGCTGCTCCAGATGCCCCACGGCGCGATTTTCATCTG | |
| | | CTGAACCTCGATGAGCATGTAGATTACCCAGGTTATGAAGAATATT | |
| | | TTGCGGCCAAGACCCGTGTCGTCGCGGCACTCGAAAACCTGTTTGG | |
| | | TGGTGACGTGCGTTGCTCAGGCTCTATGTGGTATCCGCCGTCGAGC | |
| | | TATCGCTTATGGCATACAAATGCCGATCAACCGGGGTGGCGTATGT | |
| | | ACCTGGTAGATGTAGATCGCCCATTCGCGGACCCCGACCGTACCTC | |
| | | CTTCTTTCGCTACCTGCATCCACGTACCCGTGAAATCGTCACGCTG | |
| | | CGCGAAAGCCCTCGTATTGTCCGTTTCTTTAAAGTCGAACAGGATC | |
| | | CCGAGAAGCTGTTCTGGCACTGTATCGCGAACCCCACCGATCGCCA | |
| | | TCGCTGGTCGTTTGGTTACGTTGTTCCGGAAAACTGGATGGACGCC | |
| | | CTCCGTCACCATGGC | |
| cln1B | Codon | ATGCCTTTATGGTTAGCGCAGGACGTCCACGCGGTCGCTCTGGACG | 473 |
| | optimized | AAGATATCGTGGTGCTGGATGCGGTGAGCGACGCATACCTGTGTTT | |
| | | AGTTGGTGCCAGCGCTCTGATCAGCTTGGGCAGCGAGCGTTCCGTC | |
| | | AGTGCAGATCCGGTGGCCGCTGAGACACTTCGTGAGGCTGGTCTGG | |
| | | TGGGTCCACATCCTAGCGGCGCCACCCGACCAATACCTCCGAAGCC | |
| | | GACGATTGACTTACCTGATGCAGCCCGTCAGGCGCAAGGTCGTGAA | |
| | | TTACGTGCCGCCGCGTGGGCTGGCGCGGCAACCGCAATCGATTTCC | |
| | | GCCGGCGTTCATTTAGACAACTCCTCGCGAGAGCAGGGCAACGCCC | |
| | | GCCGGGTCAAGCAGCTGCTCCGGCTGATGAGGTATTGGCAGCAGCC | |
| | | GCAGTGTTCATGCGGTTACGTCCATGGTCACCCGTTGGAGGCGCGT | |
| | | GCCTTATGCGTTCGTATTACTTATTACGGCATTTGCGCATCCTCGG | |
| | | TTTCGATGCCGATTGGATCATTGGTGTGCGTACGTGGCCATTTATG | |
| | | GCCCATTGCTGGCTGCAGGTCGGTGCCGTCGCACTCGACGATGACG | |
| | | TCGAGAGATTAACAGCATACACACCGATTCTGGCGGTG | |
| cln1C | Codon | ATGGGCGACTACCTGGCTCTGTACTGGCCGCGCGGCATGCCCGGTG | 474 |
| | optimized | TAGCTGCAGACGCAATGCGGGCCGCCATCGAAGCTGAGGGCGCCTG | |
| | | GACCCTGGCGTTCGAGGCCTACCAGCTGGTAGTGTATGTCAAAGGG | |
| | | CCCCGAGCACCTAAAGTGCGTGCCCTGCCGGATCAGGGCGGGGTGG | |
| | | TCATTGGGGAACTGTTTGATACTGCAGCAACCCGCGAAGGACGCGT | |
| | | GCAGGACTTTCCTATAGCGCTGATCAAAGACGTCGCAGCTCAGGAT | |
| | | GCCGCACGTATTCTTGCTACCCATGCGTGGGGTCGTTATGTGGCTG | |
| | | TATTAAAAGCCGGTGATCGTCCGCCATGGATCTTTCGCGATCCAAG | |
| | | CGGGGCGGTGGAATGTCTGGCGTGGGTCCGCGATGAAGTGACCATC | |
| | | ATTAGCAGCGATGTTGCAGCGCAACGAGCTTGGTCCCCTGATCGGC | |
| | | TGGCGATTGACTGGTCGGGACTGGGACGTGTACTGGCACGCGGAAA | |
| | | CTTATGGGGAGAAATTTGCCCGCTGGCTGGCGTCACGGCGATTGCG | |
| | | CCAGGTACCGCACGGTGTGATCTCGGTGATGCAGCTCTGAGCCTGT | |
| | | GGCGCCCAGGAGATCATGCACGTCGTAGTCGTCATGATGTTTCCCC | |
| | | ACGTGATTTGGCAAGAGTGGTGGATGCTAGCGTTGCAGCCCTGGCT | |
| | | AGAGATCGCAGCGCTATTCTGGTCGAAATCAGCGGGGGACTGGATT | |
| | | CCGCTATCGTTGCCACGTCGCTGGCTCGTTGTGGAGCCCCAGTTGT | |
| | | TGCTGGAATTAACCATTACTGGCCCGAACCGGAGGGTGATGAACGT | |
| | | CGCTGGGCCCAGGACATCGCAGATCGGTGCGGTTTTCGCCTGATCG | |
| | | CGGGCCAACGTCAGCGGCTGTTGCTGGACGAGGCAAAGCTGCTGAG | |
| | | ACATGCACAGGGCCCGCGACCTGGTCTGAATGCGCAGGACCCGGAC | |
| | | CTCGATCACGATCTGGCGGAACAGGCTAAAGCGTTGGGTGCCGATG | |
| | | CACTGTTCTCAGGGCAAGGTGGCGATGGTGTGTTCTATCAAATGGC | |
| | | AAATGCTGCACTGGCAGCCGATATCCTCATGGGGAAACCTGCTCCT | |
| | | ATGGGTAGAGCCGCGTCTTTAGCCGCTGTGGCTCGTCGGGCACGAG | |
| | | CCACGGTCTGGAGTTTGTGCGGCCAGGCTATGTTTCCGTCGCGCGC | |
| | | ATTTGCCGCTGGTATGCCGCCGCCAAGTTTCTTGAGCGCCGGTTTG | |
| | | GCGCCGCCACCCGTGCACCCGTGGATTGCAGACCAGCGCGGTGTTT | |
| | | CACCGGCGAAACGTATTCAAATTCGGGGGCTGACCAATATTCAATG | |
| | | TGCTTTCGGCGATAGCTTACGGGGCCGAGCAGCAGATCTTTTATAT | |
| | | CCGCTTATGGCCCAACCGGTCATGGAACTGTGTCTGTCTATCCCTG | |
| | | CACCGCTGTTGGCAGTAGGCGCATTGGATCGCCCTTTCGCACGTGC | |
| | | GGCGTTCGCAGATCGATTACCTCCTCGTTCACTCGTTCGACGCTCA | |
| | | AAAGGTGATGTTACCGTGTTTTTCAGCAAAAGCCTTGCAGCAAGCC | |
| | | TGCCGGCCCTTCGTCCTTTCCTGCTGGACGGGCGCCTTGCAGAACA | |
| | | GGGTCTGATCGATCGAGCAAAACTGGAACCTCTGCTGCACCCCGAA | |
| | | CCGATGATTTGGCGCGACTCAGTCGGCGAGGTAATGCTGGCAGCGT | |
| | | ATCTTGAAGCCTGGGTGCGCGCATGGGAAGCCAAGTTGCGTGTTAG | |
| | | C | |
| cln2B | Codon | ATGACTCTGACCTGGCGCCCGGGTGTTCACGCGGTAATGGTCGAAG | 475 |
| | optimized | ATGATCTGGTTCTGCTGGATGAAGCAGCGGACGCTTATGTCTGTTT | |
| | | GTTGGATGGCGCCAAAGTGGTTAGCGTCCGGGCTGACGGTGCTCTG | |
| | | AGCTTCAATCCCCCACATGCAGCAGAAGATATGATCGCGGGTGGCC | |
| | | TCGTCGAACCTTCATCAAGTGCCGCGGCGTCAGCAAACCCGCCGGC | |
| | | AAAACTCCCATGTACTCCGCTGGCGCGCTTATCGCGCCCGCGGCAT | |
| | | GTAAAAGTGCGTCCGGCTGAAGCGGCCTTGTTCCTGATCCAAGCCT | |
| | | GGGGTGTTGCGCGTGCGGTACGTCGTTGGCCAATGGCTAGATTATT | |
| | | AGAAGCATTACGTGGAGATCGTGCCGCAGAACCGGCGAAAGGCCGC | |
| | | CGATCGATGGCGGAGGCGTGCGCTGTTTTTGATGCGCTTCTGGCCT | |
| | | GGAGCCCTTTTGACGGTGAATGTTTGTTTCGCTCAGTATTACGACG | |
| | | TAGATTTTTAATGGCACTGGGCCATTCGCCGGACTTGGTGATAGGC | |
| | | GTGCGTACCTGGCCGTTCCGCGCACATTGCTGGCTGCAGAGCGGAG | |
| | | TGGATGCCCTGGATGATTGGCCGGAACGGCTCTGCGCATATCGCCC | |
| | | GATTCTGGCAGCTTCTGCAAGCCAGGGTAGA | |
| cln2C | Codon | ATGAGTTACCTGCTGATGACCTGGCCGCCGGGGCAGCCGAGCGTAG | 476 |
| | optimized | AAGCTGATGCACTTCACGCAGCCTTTAACGGGCAGGGTGGATGGAG | |
| | | CCTGGTTTTGGAACGATTCTGCCTGCGCGTATACGTGCGTGGCGCG | |
| | | GCAGCCCCTGCAGTTACCCTTACCCCGAAAGGAGGCGTGCTCATTG | |
| | | GTGAGATGTTTGATCGGGCTGCCACAGAAACGGGCGCCGTTGCCGC | |
| | | TTATGATCTGAGCCGCCTGGGAGATGACGACGGTATGGCCGTAGCC | |
| | | CGGCGTGTGGTGGACGAAGCGTGGGGGAGATATGTGTTGGTGCTGC | |
| | | CAGTTAAAGAACGCCGTCCAGTGGTTTTGCGAGAACCACTGGGCGC | |
| | | GCTGGATGCGCTGATCTGGCGCAAAGGCGATGTCTGGTGCGTGGGG | |
| | | GCAGACGTACCCCCGGGTCTTGAACCAAAAGATCTGGGTGTGGAAG | |
| | | AGACTAGACTGACGCACCTGATCGCGGAACCGGATCTGGCATCTGC | |
| | | GAGCCTGCCCTTAACCGGCGTCGCGGCAGTGATGCCAGGTACTGCG | |
| | | GTCGATGAAACCGGCCAGGTGCACCGTCTGTGGACCCCCGCGCGTT | |
| | | TTGCTCGCTCCCCTCGCACTGACGCGTGGACTGCAGCCGAACGTAT | |
| | | TCCGCTGGTTACCCGTGCGTGCATCGCGGCGCTGTCTGCGAATCGA | |
| | | AGTGGTATTCTGTGCGAGATTTCGGGCGGCCTGGATAGCGCTATTG | |
| | | TTGCGACCTCTCTGAAAGCGGAAGGTGCGAAGATTAGTAGCGGGAT | |
| | | CAACTTCCATTGGCCCCAGGCTGAAGCAGATGAGCGCCCGTACGCA | |
| | | CGCGCTGTTGCGAAAAGCGTGCGAACCCGGTTACAGGTGGTAGCGA | |
| | | GTCGTGTAGCGCCCGTTGACCCGGAAACGTTTGATGAGATCGTGGT | |
| | | CGCGCGACCAAGTTTTAATGCCATTGATCCAGTCTATGATACCGTA | |
| | | CTGGCCCAACGTCTGATTCAGGGCGGTGAAGGAGCCCTGTTTACCG | |
| | | GACAAGGTGGTGACGCAGTTTTCTATCAGATGCCAGCACCACAACT | |
| | | TTCGTTGGATTTGTTGGCTCGTGGCCCCCGCCGCCGCGGTCTTATG | |
| | | GGATTATCACGCCGCACCAACCGCAGTGTCTGGTCGTTGCTGCGCA | |
| | | TGGGCTTACGTGCACCCGTACGAGCAACCTTTCCCTACGGTGCGAG | |
| | | AGGTGCCGATCGTCCTCCGATGCACCCGTGGCTGGAGGACGCGCGT | |
| | | GGTGTTGGGGCCGCGAAACGGATTCAGATCGAAGCGCTGGTTGCTA | |
| | | ACCAGGCCGTGTTTGAAGCATCTCGTCGCGGTGCGGCGGCTCATTT | |
| | | GGTGCACCCACTGCTGTCGCAACCGCTTGTGGAGCTGTGCCTTTCA | |
| | | ACCCCAGCGGCCGTGCTGGCGGGTGCCGAACAAGATAGAGCATTCG | |
| | | TGCGTAGCGCTTTTCGTGCGCAACTGCCACGCCTGGTCTTAGATCG | |
| | | TCAAAGCAAAGGAGATCTGAGCGTTTTCTTTGCTAAAGGTGTGGCG | |
| | | CGGAGCTTGCCGGGCTTGCGTCCGCGTCTGCTCGAAGGACGCTTAG | |
| | | CGGCACGTGGCCTGATCGACGTGGAAGCGTTATCACAAGCGATGCA | |
| | | GCCAGAAGCGATGATTTGGCGTGACGGTTCGGCCGAAATCCTGTGC | |
| | | CTTGCTGTTCTGGAATCATGGCTCCGCTCTTGGGAGGCTCGTGGTG | |
| | | CA | |
| cln3B | Codon | ATGCGCGTTGCAGTGCCGGATCATTTAGCGTATTGCGTAAAACAAG | 477 |
| | optimized | GTGGAGTTACGTTTCTGGACGTCCGCGGGGATCGTTACTTCGGCCT | |
| | | GCCGCCGGTGCTGGAACACGCGTTCGTTGCCATTGCCGAGGCGGAT | |
| | | TTTCTGCTGAAAGAACCAAATTCACTTCTGGAGCCACTCGAAGCAC | |
| | | TGGGTGTCTTAGTGCGAGGCCAAGCCCGCCGTGCCGATCTGACAAT | |
| | | TCCGTCTGCAAATCTGTCATGGGTGGATGAGGTCAGCCCGACCCCA | |
| | | CCACGTCTTGACCCTGCGTCACTCGTCGCAACCGTCACGTCTGTTA | |
| | | TTCGAACGCGTCTGAGCCAAAAGAGTAAGTCCTTGCAGGCTCTCTT | |
| | | GGAAGAGGTCCGTACCCGCCGTCCGGGATCGCCGGCCCATAATTGG | |
| | | CAGCTGATGCGTCGTCTGACGGCTGGATTCCGTGCATCGCGTGCTT | |
| | | GGGCGCCGATAGAACCCATCTGCCTCCTGGACAGCTTGGCGTTACT | |
| | | GGATTTTCTGCATCGCCGTGGCCTGTATCCGCATATTGTTTTCGGT | |
| | | GTGATCCGCCAACCGTTTGCCGCTCATTGTTGGGTGCAAGCTGATG | |
| | | ATGTAGTCCTGAATGACCGGCTGGATCATGTCGGTGAATATACACC | |
| | | GATCCTGGTGGTC | |
| cln3C | Codon | ATGGAAGATTACGTGGTCCTCATTTGGCCGGCACTCGCTGAAGCTC | 478 |
| | optimized | CTGCACGCGACTTGATTCGTCGCCTGCCGAAACTCAAAACCGTCAT | |
| | | TGAAACTAGCGGATTGGTGGTACTGCGCCCCGAAAATGGTGCGGGT | |
| | | CTGCGGGTAGGCGGGAACGGTGTGGTCCTGGGTAGCGTCTTTCGCA | |
| | | CCGGCGGTGATCGCGAAACTGTTGCGGAATTTTCGGAATCGGAAGC | |
| | | ATCCGCGATCGCCACGAGTCGTGGTCAGCAGTTAGTGACAGAGTTC | |
| | | TGGGGTGGCTACCTGGCTGTTCTTGGAGATGCTTCGCGTTCCGAAG | |
| | | TGATGGTCCTGCGAGATCCTTCAGGTGCAATGCCGGCTTATTGTTT | |
| | | AGTTCATGGCGAAGTCCAGATCATCTGCTCTCGCTTGGAGGTCCTG | |
| | | GAGGACGCAGGACTGGGGCAGCAGGCGCTGAACTGGGACGTGGTGG | |
| | | CGCAATTACTGGCCTTCCCAAACCTTCGAGGTCGCTCAACGGGTCT | |
| | | TAAAGGCGTGGAAGAATTACTTCCCGGTTGCCGTCTGACATTTACG | |
| | | GGAGGACTGAAAACCGAAACGCTGACCTGGAACCCGTGGCTTTTTG | |
| | | CCCGCCCATCTGCGCAAGCGCCTGAACGTGGAGTTGCGGCGACCGC | |
| | | CGTGCGTCAGGCGGTGGAAGTAAGCGTTCGAAAATGGGCTGATCAG | |
| | | AGTTCACCGGTACTTTTGGAATTGTCAGGCGGGCTGGATAGTAGTA | |
| | | TCATCGCCTGCTGTCTGGACGAACCGCGCACCGCGGCCACCTTCGT | |
| | | GAACTTTGTCACACCGACGGCCGAAGGCGATGAACGAGGATATGCA | |
| | | CGTCTGGTTGCCAAGGCAGCAGATAAACAACTGATCGAGCAGGACA | |
| | | TCCGGGCTGACGAAGTAGATGTTACCCGTCCAAGACCTGGCCGCCA | |
| | | TCCTCGTCCGGCCAGTCAGGCGCTGTTACAGCCGCTGGAACAGGCT | |
| | | TGCGCTGAACTGGCACCTCAGTTGGGTGCGAGAAGTTTCTTCTCCG | |
| | | GTCTGGGAGGAGACAACGTGTTTTGTAGCATTGCAACCGCAAGCCC | |
| | | GGCTGCGGATGCACTTTTGACTAGCGGTCTGGGCCGACAGTTCTGG | |
| | | GCCGCAATCGGGGACCTGTGTGCACGTCATAACTGCACCGTATGGG | |
| | | CAGCCTTAAGCGCCACGCTGAAGAAACTGCTCCGCTCAGATCGTCG | |
| | | TCTGGTGATCAAACCAAACCTGGATTTTCTGTCCTTTCGGGAGGAC | |
| | | GCCATAGACCGTCCGGATCACCCATGGCTTGAAGTGGCCGCCGATC | |
| | | GTCTGCCGGGGAAACGCGAACATGTCGCAAGCATTCTGTTGGCGCA | |
| | | AGGCTTCCTGGATCGTTATGAGCACGCTCAGGTTGCTGCCGTCCGC | |
| | | TTTCCCTTGTTAACGCAACCGGTTATGGAGGCTTGTCTGCGCGTGC | |
| | | CGACCTGGATGGCAAACCACCAGGGTCGCAATCGGGCGGTCGCACG | |
| | | CGATGCCTTCTTTGATCGCTTGCCCCCGAGAGTACGTGATCGGCAG | |
| | | ACAAAAGGAGGTTTGAACGCGTTTATGGGTGTTGCGTTCGAACGCA | |
| | | ACCGTCAGGCCTTAGCTCGTCATCTGTTAGACGGGCGCCTGGTACA | |
| | | GCGTGGCCTGATAGATGCAGTGGCAATAAAATCGGCGCTGGCCTCA | |
| | | CCAGTCCTGGAAGGAGGAGCCATGAACCGCTTACTGTACCTGGCCG | |
| | | ATGTCGAATCCTGGGTACGCTCATGGGAAGATGTG | |
| comQ | Codon | ATGAAGGAAATCGTGAAACAGAATATCAGTAACAAAGACCTGTCGC | 479 |
| | optimized | AACTCCTGTGTTCCTTCATTGATTCAAAGGAAACTTTCAGTTTTGC | |
| | | CGAGAGCGCTATACTGCATTATGTAGTATTCGGCGGTGAGAACCTG | |
| | | GACGTAGCTACCTGGCTGGGCGCCGGAATTGAAATTCTGATCCTGA | |
| | | GCAGCGATATCATGGACGACCTGGAGGACGAGGATAACCATCATGC | |
| | | GTTGTGGATGAAAATTAACCGCAGCGAGAGCTTGAATGCGGCCCTG | |
| | | TCCTTATACACCGTCGGCTTAACGAGCATCTATTCCCTGAACACAA | |
| | | ATCCGTTGATATTTAAGTATGTGCTGCGCTACGTCAATGAGGCCAT | |
| | | GCAGGGTCAGCATGATGATATAACCAATAAAAGCAAAACCGAAGAT | |
| | | GAATCGCTTGAAGTGATTCGCCTTAAATGCGGCAGCCTGATCGCCC | |
| | | TGGCAAATGTCGCGGGCGTGCTGTTAGCCACGGGCGAGTACAATGA | |
| | | AACAGTTGAACGTTACTCTTATTACAAAGGCATCGTGGCGCAAATT | |
| | | TCCGGCGACTATCACGTGCTGCTGTCAGGAAACCGGAGCGATATCG | |
| | | AGAAAAACAAACAGACACTGATTTACCTGTATCTGAAACGCCTGTT | |
| | | TAACAACGCGAGCGAGGAATTGCTGTATCTGTTCTCCCATAAAGAT | |
| | | TTGTACTATAAAGCCCTGCTCGACCGTGAAAAGTTTGAAGAAAAAC | |
| | | TGATCCAGGCCGGGGTGACGCAGTACATCAGCGTTCTGCTCGAAAT | |
| | | ATATAAGCAGAAGTGCTTCTCCACCATAGAACAGCTGAACTTAGAT | |
| | | AAAGAAAAGAAAGAGCTGATCAAGGAGAGCCTGCTGTCATATAAGA | |
| | | AAGGCGACACCCGTTGCAAGACC | |
| crnM | Codon | ATGAATGATATCAACAAAAACAAAACTAAAACCATTAACGAAAAGA | 480 |
| | optimized | TTAAAATTTTCACCAAAGAAGAGGTGATTGATATCAGTTACTTTGA | |
| | | AGAATGGCGCAGCGTTCGTACTCTGCTTAACGAAAACTACTTTAAA | |
| | | ATTATGCTCGAGGAAATGAATATTTCCAAAAACCAATTTTCGTATG | |
| | | CGCTGCAACCGTTAAACGACGAGTTCAAACTGCATACTAACGTTAA | |
| | | AAATGAAGAATGGATCAAATGCTTTAATCGCGTCATTAACAATTTT | |
| | | AACTATAAAAATATTAACTATAAAGTTGGTTTGTACCTGCCTATTC | |
| | | AGCCTTTCTCCGTTTATTTACAGGAGAAACTGAAAGAGATCCTGAA | |
| | | GAAGCTGAACAACATTAAGATTAATGATAAAATTATCGACGCCTTT | |
| | | ATCGAAGCTCACCTGATCGAAATGTTCGACCTCGTCGGTAAAGTAA | |
| | | TCGCCCTTAAATTTGAAGATTATAAACAGATCAACTTCCTGAAAAA | |
| | | CACAAATAATGGCACCCGCTTGGAGGAATTCTTGCGTAGCACCTTT | |
| | | TATTCTCGGAAGTCATTTCTGAAACTGTTTAACGAGTTTCCGGTAC | |
| | | TCGCGCGGGTTTGCACCGTACGTACGATCTATTTGATCAATAACTT | |
| | | TAGTGCTATCATCCAGAACATCAATAGCGACTACCTGGAAATCCAG | |
| | | GAATTTCTGAACGTCGATTTCCTGAACTTGACAAACATCACTCTTT | |
| | | CGACGGGTGATTCCCACGAACAGGGTAAAAGTGTGTCCATCCTCTA | |
| | | TTTTGATGAAAAAAAGCTGATTTATAAACCGAAAAATCTGAAGATT | |
| | | TCAGAAATTTTCGAGAGCTTCATCGACTGGTACACCAACGTCTCTA | |
| | | ACCATAAGCTGCTCGACCTGAAAATCCCGAAAGGAATTTTTAAAGA | |
| | | CGATTACACTTATAACGAATTTATTGAGCCAAACTACTGCGAGAAT | |
| | | AAGCGCGAAATTGAAAATTACTATAACCGTTATGGGTACCTGATCG | |
| | | CAATCTGTTATCTGTTCAACCTGAATGACCTGCATGTAGAAAATGT | |
| | | GATCGCCCATGGCGAGTACCCGGTTATTGTTGATATTGAAACGAGC | |
| | | TTTCAAGTCCCTGTGCAAATGGAGGACGATACTTTATATGTGAAGC | |
| | | TGTTGCGCGAGCTGGAATTGGAAAGCGTTTCATCGTCGTTTCTGTT | |
| | | ACCTACCAATCTGTCGTTTGGTATGGACGATAAAGTGGACCTGTCC | |
| | | GCGCTGAGCGGAACCATGGTCGAGCTGAATCAGCAAATTCTGGCGC | |
| | | CTGTCAACATTAATATGGACAACTTTCATTACGAGAAATCACCGAG | |
| | | CTATTTTCCAGGCGGAAACAATATCCCTAAAAACAACAAATCAGTG | |
| | | ACTGTTGATTATAAAAAATACTTGCTCAATATTGTGACTGGTTTCG | |
| | | ACGAATTTATGAAGTATACCCAAGAAAATCAGCTGGAATTTATTGA | |
| | | GTTCCTGAAAAAATTCTCAGATAAAAAAATCCGGGTGCTGGTGAAG | |
| | | GGTACGGAAAAATATGCGTCCATGATTCGCTACAGCAACCATCCGA | |
| | | ACTACAACAAAGAAATGAAATATCGCGAGCGTCTCATGATGAACTT | |
| | | GTGGGCGTACCCTTACAAAGACAAGCGTATTGTTAATAGCGAAGTA | |
| | | CAGGACCTGTTATTTAACGATATCCCGATCTTTTACTCCTTTCCAA | |
| | | ATAGCCGTGACCTCATTGATAGTCGCGGCTTGGTGTATAAAGATTA | |
| | | CCTTCCTGTGACAGGACTGCAGAAAGCAATTGATCGCGTGAAAGAT | |
| | | ACCTCGGTAAAAAGCTTGTTCGACCAGAAGCTGATTCTTCAGAGTA | |
| | | GCTTAGGTCTGTGGGATGAGATTCTCAACAAGCCGGTCCAGAAAAA | |
| | | GGAACTGCTCTTTGAAAAGCAGAACTTTAACTATGTGAAAGAGGCG | |
| | | ATCAATATTGCGGAATTGCTGATTGGCTATTTAATCGAAACGGACG | |
| | | ACCAGAGCACCATGCTGAGCATTGATTGTTCTGAAGATAAACACTG | |
| | | GAAGATTGTTCCTTTAGACGAATCCCTGTATGGTGGGCTGTCCGGC | |
| | | ATTGCATTATTTTTTCTCGATATTTATAAAATTACCAAAGATGAAA | |
| | | AATATTTTAATTACTATGATAAAATCATTTCCACGGCCATTAAACA | |
| | | ATGTAAAGCGACCATCTTCTCGTCAAGCTTCACGGGTTGGCTGAGT | |
| | | CCCATTTATCCGTTGATTCTGGAAAAGAAATACTTTGGTACCATGA | |
| | | AAGATAAGAAATTCTTTGACTACACGATGGAAAAGCTGTCGAATAT | |
| | | GACTGAAGAACAAATTAACAACATGGATGGTATGGACTATATCAGT | |
| | | GGCAAGGCGGGTATTGTCAAACTGCTGATTAGCGCGTACCGGGAAT | |
| | | CGAAGAACAATGAAAACATCGGACTGGCCCTGAGTAAATTCAGCAA | |
| | | CGATCTGATTCAAAATATTGGCACCGGCAAAGTCAGTGAATTACAA | |
| | | AACGTGGGCCTGGCGCACGGCATTTCTGGTATTATGGTCGTAGTAG | |
| | | CCTCACTGGACACGTTTAAAAGTGAATATATTCGCGAGCAGCTGGC | |
| | | AATTGAATATGAGATGTTCTGTTTGCGTGAAGATTCATACAAATGG | |
| | | TGTTGGGGCATCTCTGGAATGATTCAAGCCCGTCTCGAAATTCTGA | |
| | | AACTGAGCCCGGAGTGTGTGGATAAAAAAGAGCTGAACTTGCTTAT | |
| | | TAAGCGTTTTAAAAACATCTTGAATCAGATGATTAACGAAGATTCC | |
| | | CTTTGTCACGGCAACGGTTCGATCATTACTACGATGAAGATGATCT | |
| | | ATATGTACACCCAAGACACCGAGTGGAACTCTCTGATTAATCTGTG | |
| | | GTTATCAAATGTAAGTATCTATTCGACCTTACAAGGCTATAGCATT | |
| | | CCAAAGCTGGGCGATGTAACAATTAAGGGGTTGTTTGATGGCATTT | |
| | | GTGGTATTGGCTGGTTATACCTGTATTCGAACTTTAGCATTGAAAA | |
| | | CGTGCTGCTCCTCGAGGTC | |
| csegB | Codon | ATGGACCTGTGGTTGAGCGCCGGGGTCTATGCTGTCATGATCGATG | 481 |
| | optimized | ATGATGTAGTTTTCCTGGACGTCGCCACCAATGCATACTTCTGCCT | |
| | | CCCAGCCGTTGGGAGCGTGTTGGCACTCGAAGGTCGTTCGCTGCGT | |
| | | GTGGCGGCTCGCGAACTGGCAGAAGATCTTATTCAGGCAGGCTTAG | |
| | | CATCCGCGGCTGCGGCAATCGAACCCCCACCGAGCACACCAGCCCC | |
| | | AGTTCGCACTGCGCGTGCGGTATTGGAAGCTCTGCCGGCGCGTGAA | |
| | | AGACCACGTCCACGTCTTGCCCACTGGCGTCAGGCGATTATGGCTG | |
| | | GCTTGGCGTCCCGTGCCGCTGAACGTCGACCATTCGCGCAGAGACT | |
| | | GCCGCCGCCTTCAACGGGGGTTTCACCTCCGGCATCAGAAGGCCTG | |
| | | CTTGCCGATCTGGATGCGTTCCGTCGACTTCAGCCATGGTTGCCGT | |
| | | TCGACGGTGCTTGTCTGTTCCGTAGCCAAATGCTGCGCGATTATCT | |
| | | CCTTGCGCTGGGTCACCGCGTTGACTGGATTTTCGGTGTACGTACG | |
| | | TGGCCGTTTGGTGCCCACTGTTGGTTGCAGGCCGGCGACCTGGTGC | |
| | | TGGATGATGAGGCCGAACGTCTGATTGCGTATCACCCCATTATGGT | |
| | | AGGT | |
| csegC | Codon | ATGGGGTATGCCGCATTGACTTATCCGGGTGGTTTAGCGGCAGCAG | 482 |
| | optimized | CGTTTGATGAGATGGTAGAAGCACTGATCGATGCTGGATGGACCTT | |
| | | GGCGTTGCGTGCGTTCAGACTCGCCGTTCTCACCGATGGTCAGGCT | |
| | | CCAGCCGTGTCGCCGCTGATGGGCAGAGGCGGCGTAGCAGGCGTTC | |
| | | TCATCGGCGAAGCGTTTGATCGTCGCGCCACATTAGGTGGCGCGGT | |
| | | CGCACGTGCCGCGCTGGATGGTTTGGCTGACATCGATCCGCTGGAA | |
| | | GCAGGTCGCCATCTGATTGAAACCGCGTGGGGCGGCTACGTGGGTA | |
| | | TGTGGATTGGTCGGGCCGAAGCTGGTCCGACACTGCTGCGCGATCC | |
| | | TAGTGGCGCGCTCGAAGCCTTAGCGTGGCGCCGTGACGGTGTAACC | |
| | | GTTATGTCAGCGCGCCCGTTGACGGGGCGCGCAGGCCCAGCTGATT | |
| | | TAGCAATCGATTGGCCACGTATCGTGCAGATTCTGGCCGATCCCAT | |
| | | TTCCGCGGCTCTCGGCCCGCCCCCTCTGACTGGCTTAGCGACCATA | |
| | | GACCCGGGCGCGGCGGTTCATGGCGCGGATGGCCAAGAACGCTCAG | |
| | | TGCTGTGGACCCCAGCTGCAGTTGTCCGTGGTGCTCGTCACCGTCC | |
| | | TTGGCCAAGCCGTCAGGATCTGCGTCGCACCATCGATGCGACTGTC | |
| | | GCGGCACTGGCCTCGGATGCGGGCCCGATTGTCTGCGAAATTTCAG | |
| | | GAGGTCTGGACTCGGCCATAGTTGCGACTAGCCTTGCGGCGTCCGG | |
| | | TCTGGGTCCGCAGCTGACAGTGAATTTTTACGGTGACCAGCCTGAA | |
| | | GCTGATGAACGCGGATACGCTCAAGCCGTCGCCGAACGTATCGGTG | |
| | | CGCCTCTGCGGACCCTTCGTCGAGAGCCGTTCGCGTTCGATGAAAC | |
| | | CGTGCTGGCAGCCGCTGGACAGGCCGCACGTCCGAATTTTAACGCC | |
| | | CTCGATCCTGGATACGATGCCGGGCTCGTGGGTGCCCTGGAAGCTA | |
| | | TCGATGCTCGTGCATTATTTACGGGCCATGGCGGTGATACCGTGTT | |
| | | TTATCAAGTGGCGGCCAGTGCCTTGGCCGCAGACTTACTGGGCGGC | |
| | | GCACCATGTGAAGGTAGCCGCCGTGCACGTTTAGAGGAAGTAGCTC | |
| | | GGCGGACCCGACGCTCGATTTGGAGTCTTGCATGGGAAGCGTTTTC | |
| | | TGGTCGACCCAGCACTGTAAGCATTGAAGGTCAGTTGCTTCGACAG | |
| | | GAAGCAGAGAGAATTCGGCGCGTCGGCCTGACCCATCCGTGGGTTG | |
| | | GAGGCCTGTCGTCTGTGACCCCTGCGAAACGCCAGCAAATCCGCGC | |
| | | GCTGGTCAGTAACCTGAACGCGCATGGCGCCACTGGTCGCGCCGAA | |
| | | CGCGCTAGAATCGTGCACCCGCTTTTAGCTCAGCCGGTGGTTGAAG | |
| | | CCTGCCTGGCGATTCCTGCCCCTATCCTCAGTGCGGGCGAAGGAGA | |
| | | ACGCTCATTTGCGAGAGAAGCCTTTGCAGACCGTTTGCCACCGAGC | |
| | | ATTGTGGGCCGCCGAAGCAAAGGGGAAATTAGTGTGTTTCTTAACA | |
| | | GATCTTTAGCAGCCAGCGCCCCCTTTCTGCGTGGCTTTTTACTTGA | |
| | | AGGACGGCTGGCGGCTCGCGGGCTGATTGATCGTGACGAACTTGCA | |
| | | GCCGCGCTGGAACCGGAAGCAATCGTCTGGAAGGATGCGTCACGCG | |
| | | ACCTGCTTACTGCGGCGGCCCTGGAGGCGTGGGTCAGACATTGGGA | |
| | | AGCACGTATTGGCGAGGGGGAAGCAGCGGAAGGTGAGCGTGCTGCC | |
| | | GGTCGTGGTACCGCAGCGACGGGACCGCGTACAAGCGCGCGGAAGG | |
| | | CGAACACCGGT | |
| epiD | Codon | ATGCACGGTAAACTGCTGATCTGCGCAACTGCTTCGATCAACGTCA | 483 |
| | optimized | TCAATATCAACCATTATATTGTGGAGCTGAAACAGCACTTCGATGA | |
| | | GGTGAATATCCTGTTTTCACCTTCCTCGAAGAACTTTATCAACACC | |
| | | GATGTCCTGAAGCTGTTTTGCGATAATCTGTATGACGAGATCAAAG | |
| | | ATCCGCTGCTGAACCACATCAACATAGTGGAGAACCACGAGTATAT | |
| | | CTTGGTGCTGCCTGCCAGTGCCAATACGATCAACAAAATCGCGAAC | |
| | | GGTATATGCGATAACCTCTTGACGACCGTATGCTTAACCGGGTACC | |
| | | AGAAACTGTTTATCTTTCCGAATATGAACATCCGCATGTGGGGAAA | |
| | | TCCGTTCTTACAGAAAAATATTGACCTGCTTAAAAGCAACGACGTG | |
| | | AAGGTGTATTCCCCCGACATGAACAAATCTTTTGAGATAAGCTCAG | |
| | | GCCGCTACAAAAATAACATCACGATGCCGAATATCGAAAACGTGCT | |
| | | GAATTTTGTCCTGAACAATGAGAAACGCCCGCTGGAT | |
| halM1 | Codon | ATGCGCGAACTCCAAAATGCGCTTTACTTTAGCGAAGTGGTTTTTG | 484 |
| | optimized | GACCGAATCTTGAGAAGATTGTAGGAGAAAAGCGCCTCAATTTTTG | |
| | | GCTCAAACTTATAGGTGAGGACCCGGAAAACCTGAAGGAGTTTCTC | |
| | | TCGAGAAAGGGCAATTCTTTCGAAGAACAAACCTTACCGGAAAAGG | |
| | | AAGCTATCGTTCCGAACCGCTTAGGTGAAGAGGCGCTGGAAAAAGT | |
| | | CCGCGAAGAACTTGAGTTCCTCAATACTTACAGCACTAAACATGTG | |
| | | CGTCGCGTTAAAGAGTTGGGAGTGCAGATCCCTTTCGAAGGGATTC | |
| | | TGCTGCCATTCATTAGCATGTATATCGAAAAATTTCAGCAGCAGCA | |
| | | ACTTCGCAAAAAGATAGGGCCGATTCACGAAGAGATCTGGACGCAG | |
| | | ATTGTTCAAGATATCACCTCCAAATTAAATGCGATTCTGCACCGTA | |
| | | CCCTGATCCTGGAACTGAATGTAGCTCGTGTTACCTCCCAACTTAA | |
| | | AGGTGATACTCCGGAAGAAAGATTCGCCTACTACTCGAAAACCTAT | |
| | | TTAGGCAAACGTGAAGTAACTCACCGTCTGTATAGCGAATATCCGG | |
| | | TGGTTCTGCGGTTGCTGTTCACCACCATTTCACACCACATTTCGTT | |
| | | CATTACGGAAATCCTTGAACGCGTTGCAAATGACCGTGAAGCCATT | |
| | | GAAACCGAATTTTCACCGTGTTCCCCGATTGGTACCCTCGCCTCTC | |
| | | TCCACTTAAACTCGGGAGATGCTCACCATAAACAGCGTACTGTGAC | |
| | | GATTTTGGAATTCTCCTCCTCGCTGAAACTTGTCTACAAACCTCGC | |
| | | TCCCTCAAAGTTGATGGGGTGTTCAACGGTTTACTCGCTTTCCTGA | |
| | | ACGATAGAACGGGGGAAGTCATTAAGGACCAGTATTGCCCTAAGGT | |
| | | GTTACAGCGCGATGGCTACGGCTATGTGGAATTTGTCACTCACCAG | |
| | | TCTTGTCAATCCCTTGAGGAAGTGTCAGACTTCTACGAGAGACTCG | |
| | | GCTCTCTGATGAGTCTGTCCTACGTACTGAATAGTTCTGACTTTCA | |
| | | TTTCGAGAACATTATAGCTCATGGTCCCTATCCTGTCCTGATCGAT | |
| | | CTTGAAACCATCATTCATAATACAGCGGATAGCAGCGAGGAAACGT | |
| | | CTACCGCTATGGATCGCGCGTTCCGTATGTTGAACGATTCGGTGCT | |
| | | GTCCACTGGTATGCTTCCCTCCTCTATTTATTATCGCGATCAGCCG | |
| | | AATATGAAGGGTCTGAACGTCGGAGGTGTGAGCAAATCAGAAGGTC | |
| | | AGAAAACACCGTTCAAAGTTAATCAAATCGCCAATCGCAACACCGA | |
| | | TGAGATGCGTATCGAAAAAGATCACGTTACCCTGAGCAGCCAGAAA | |
| | | AATCTGCCCATTTTTCAGTCTGCCGCAATGGAGAGCGTACATTTCT | |
| | | TAGATCAGATCCAGAAAGGCTTTACCTCCATGTATCAGTGGATCGA | |
| | | GAAGAACAAACAAGAATTTAAAGAACAGGTGCGTAAGTTTGAAGGT | |
| | | GTGCCGGTTCGTGCTGTTCTTCGGAGCACGACTCGCTATACCGAAC | |
| | | TGCTGAAATCTTCCTACCACCCTGACCTGCTCCGCAGCGCGTTGGA | |
| | | CCGTGAAGTACTGCTGAACCGTTTGACTGTTGACTCGGTAATGACC | |
| | | CCGTATCTCAAAGAGATTATTCCACTCGAGGTGGAAGATCTGCTGA | |
| | | ACGGTGACGTGCCATACTTCTACACCCTGCCGGAAGAACGCGCCCT | |
| | | GTATCAGGAAGCGTCTGCGATCAATAGTACGTTCTTTACCACTTCG | |
| | | ATTTTCCATAAGATTGACCAGAAAATCGATAAGCTGGGTATCGAGG | |
| | | ACCATACCCAGCAAATGAAGATCTTACACATGAGTATGCTTGCCTC | |
| | | TAACGCTAACCATTACGCCGATGTTGCCGACTTGGATATTCAGAAA | |
| | | GGACACACCATTAAAAACGAACAGTACGTTGAGATGGCCAAAGACA | |
| | | TCGGTGATTACCTGATGGAGTTATCGGTCGAGGGTGAAAATCAAGG | |
| | | GGAACCAGATCTGTGTTGGATTTCGACCGTCCTGGAAGGGAGCTCT | |
| | | GAAATCATTTGGGACATCAGCCCAGTGGGCGAAGATTTATACAACG | |
| | | GCAGCGCTGGCGTCGCTCTCTTTTATGCGTACCTGTTCAAAATTAC | |
| | | AGGTGAAAAGCGTTACCAAGAGATCGCATACAAAGCCCTGGTTCCG | |
| | | GTTCGCCGCAGTGTGGCCCAATTCCAGCACCATCCGAATTGGAGCA | |
| | | TTGGTGCGTTTAACGGAGCGTCAGGCTATCTGTACGCGATGGGTAC | |
| | | GATAGCGGCCCTGTTTAATGATGAACGTTTGAAGCATGAAGTAACC | |
| | | CGCAGCATTCCGCACATTGAACCGATGATCCACGAGGATAAGATCT | |
| | | ATGATTTCATTGGCGGTTCCGCAGGGGCGCTGAAGGTGTTCCTGAG | |
| | | CCTGTCGGGGCTGTTTGACGAGCCGAAGTTTTTGGAACTTGCCATT | |
| | | GCATGCAGCGAACATCTGATGAAAAACGCCATTAAAACGGATCAAG | |
| | | GTATCGGCTGGAAACCACCGTGGGAGGTCACCCCACTGACCGGTTT | |
| | | CAGCCATGGGGTTAGCGGCGTCATGGCATCCTTCATCGAACTGTAC | |
| | | CAGCAAACCGGTGATGAGCGCTTGCTCAGTTACATTGATCAGAGTT | |
| | | TAGCCTATGAACGTTCCTTCTTCAGCGAACAAGAGGAGAACTGGCT | |
| | | GACTCCGAACAAAGAAACACCCGTGGTAGCTTGGTGCCACGGCGCG | |
| | | CCGGGAATTTTGGTATCACGACTGCTTCTGAAGAAATGCGGCTATT | |
| | | TGGATGAAAAAGTCGAAAAAGAAATTGAGGTGGCATTATCCACAAC | |
| | | TATCCGTAAAGGCCTTGGTAACAATCGCAGTCTTTGCCATGGTGAT | |
| | | TTCGGCCAGCTGGAAATTCTTCGCTTTGCGGCGGAAGTGTTAGGCG | |
| | | ATAGCTATCTCCAGGAAGTTGTCAACAATCTGTCCGGCGAGTTGTA | |
| | | TAATCTTTTCAAAACGGAGGGATATCAGAGCGGAACCAGCCGCGGT | |
| | | ACTGAATCCGTGGGCCTGATGGTAGGTCTGTCCGGGTTTGGGTATG | |
| | | GTTTACTTTCAGCGGCATATCCATCTGCTGTCCCCTCAATCTTAAC | |
| | | ATTGGATGGTGAGATCCAGAAGTACCGGGAGCCTCATGAAGCC | |
| halM2 | Codon | ATGAAAACGCCGCTGACCTCGGAACATCCTTCAGTGCCGACGACGC | 485 |
| | optimized | TGCCGCATACTAACGACACCGATTGGCTCGAGCAATTACATGACAT | |
| | | TTTGTCCATTCCTGTTACGGAAGAAATCCAGAAATATTTCCACGCC | |
| | | GAAAATGATCTGTTCTCGTTTTTCTATACACCGTTCCTGCAGTTTA | |
| | | CGTACCAGAGCATGTCGGACTACTTTATGACCTTCAAGACCGATAT | |
| | | GGCCCTGATCGAAAGACAGAGCCTCCTGCAAAGCACGCTGACCGCG | |
| | | GTACATCACCGACTCTTCCACTTAACGCATCGCACCCTTATTAGTG | |
| | | AAATGCATATTGATAAACTTACCGTTGGCCTGAATGGCTCTACGCC | |
| | | GCACGAGCGCTACATGGATTTCAACCACAAATTCAACAAAACCTCG | |
| | | AAGTCGAAGAACCTGTTTAACATCTACCCAATTTTGGGAAAATTGG | |
| | | TCGTTAACGAAACTCTGCGCACTATTAACTTCGTCAAGAAAATCAT | |
| | | TCAGCACTACATGAAGGACTACCTGCTCCTGTCGGACTTCTTCAAA | |
| | | GAGAAGGACTTGCGTCTTACCAACCTGCAATTAGGCGTGGGGGATA | |
| | | CACACGTTAATGGGCAATGCGTCACCATTCTGACGTTTGCATCAGG | |
| | | CCAAAAAGTGGTATACAAACCTAGATCATTGTCGATAGATAAACAG | |
| | | TTCGGAGAATTCATCGAGTGGGTAAACTCGAAAGGTTTTCAGCCTT | |
| | | CCTTGCGTATCCCTATTGCGATTGATCGTCAAACCTATGGTTGGTA | |
| | | TGAATTCATCCCTCATCAAGAGGCCACCAGCGAAGATGAAATAGAA | |
| | | CGCTACTATTCTCGCATCGGTGGTTATCTGGCGATCGCCTACTTGT | |
| | | TCGGGGCAACCGACCTGCACCTGGATAACCTGATCGCCTGCGGCGA | |
| | | ACATCCGATGCTTATTGATTTGGAAACACTCTTTACCAACGATCTC | |
| | | GACTGCTATGACAGTGCGTTTCCGTTCCCGGCGCTGGCCCGCGAAT | |
| | | TAACCCAATCCGTTTTTGGCACCCTTATGCTTCCCATCACCATCGC | |
| | | GTCGGGGAAACTGCTGGATATAGACCTGTCAGCAGTAGGAGGCGGT | |
| | | AAAGGTGTGCAGTCCGAAAAGATCAAAACCTGGGTCATCGTGAATC | |
| | | AGAAAACTGATGAGATGAAGCTGGTCGAGCAGCCGTATGTTACCGA | |
| | | GAGTTCCCAGAATAAACCAACAGTTAATGGGAAAGAGGCGAACATT | |
| | | GGCAATTATATTCCTCATGTCACAGATGGCTTTCGTAAAATGTACC | |
| | | GCCTGTTTCTGAATGAAATTGATGAGTTAATGGATCATAACGGGCC | |
| | | AATCTTTGCGTTTGAGAGTTGTCAGATTCGTCATGTTTTTCGAGCT | |
| | | ACCCACGTGTATGCGAAATTTTTGGAGGCAAGTACCCACCCAGATT | |
| | | ACTTGCAAGAACCTACCAGACGTAATAAACTGTTCGAGTCCTTTTG | |
| | | GAACATCACGTCGCTGATGGCACCGTTCAAGAAAATTGTACCGCAC | |
| | | GAAATCGCGGAGTTGGAGAACCATGATATTCCGTACTTCGTCCTGA | |
| | | CTTGTGGCGGCACCATTGTTAAAGATGGATACGGCCGGGATATCGC | |
| | | AGACCTGTTTCAAAGTAGCTGCATCGAACGTGTAACTCATCGTCTG | |
| | | CAGCAGCTGGGAAGCGAGGATGAGGCGCGTCAAATTCGCTACATTA | |
| | | AAAGCAGCCTGGCGACGTTGACCAACGGTGATTGGACCCCATCCCA | |
| | | TGAGAAAACCCCGATGTCTCCGGCCTCGGCCGACCGTGAAGATGGT | |
| | | TACTTCCTGCGCGAGGCTCAGGCCATCGGCGACGACATTTTGGCGC | |
| | | AGCTGATTTGGGAGGATGACCGTCACGCCGCTTACCTTATTGGCGT | |
| | | AAGCGTGGGCATGAACGAAGCCGTCACTGTGTCACCCCTGACGCCT | |
| | | GGCATCTACGACGGCACACTTGGCATAGTGCTGTTCTTCGATCAGC | |
| | | TGGCCCAGCAGACCGGCGAAACCCATTATCGCCACGCCGCCGACGC | |
| | | TTTACTGGAAGGAATGTTCAAACAGCTGAAACCTGAACTGATGCCG | |
| | | TCTAGCGCTTACTTCGGACTGGGTAGCCTGTTCTATGGCCTGATGG | |
| | | TGTTGGGCCTCCAGCGTTCCGACTCGCATATCATTCAGAAAGCGTA | |
| | | TGAGTATCTGAAACATTTGGAAGAGTGTGTGCAGCATGAGGAAACG | |
| | | CCAGATTTTGTCTCGGGTTTGTCTGGTGTACTGTATATGCTCACGA | |
| | | AAATTTATCAGCTCACGAATGAACCGAGAGTTTTCGAAGTGGCCAA | |
| | | AACCACAGCTTCGCGTCTGTCTGTGCTGCTTGACAGCAAGCAGCCC | |
| | | GACACTGTGCTCACCGGGTTATCCCATGGCGCCGCAGGATTCGCCC | |
| | | TTGCATTACTGACCTACGGAACCGCTGCAAATGATGAACAGTTGCT | |
| | | GAAACAGGGCCACTCCTATCTGGTGTACGAACGTAATCGGTTTAAC | |
| | | AAACAGGAAAACAACTGGGTTGATTTACGTAAAGGCAACGCGTATC | |
| | | AAACATTTTGGTGCCATGGCGCCCCGGGTATTGGCATCTCACGCCT | |
| | | CCTGTTAGCGCAATTTTACGATGACGAACTGCTGCATGAAGAGTTA | |
| | | AACGCAGCACTGAACAAGACTATTTCGGACGGCTTCGGCCACAATC | |
| | | ACTCACTGTGTCATGGCGATTTCGGCAACCTCGATCTGTTATTGCT | |
| | | TTATGCCCAATATACGAATAACCCAGAACCAAAGGAACTCGCTCGC | |
| | | AAACTGGCCATAAGCAGTATCGATCAAGCGCACACGTATGGCTGGA | |
| | | AACTCGGGCTCAATCATAGCGATCAACTGCAGGGTATGATGTTAGG | |
| | | GGTGACTGGTATCGGCTATCAGCTCCTTCGTCATATAAATCCGACA | |
| | | GTCCCCAGCATTTTGGCACTGGAACTGCCCAGCTCCACGTTAACTG | |
| | | AAAAAGAGCTGAGAATCCATGATCGT | |
| kgpF | Codon | ATGATCAATTATGCTAATGCGCAGCTCCATAAGAGTAAAAACTTGA | 486 |
| | optimized | TGTATATGAAAGCCCACGAAAACATCTTCGAAATCGAGGCGCTGTA | |
| | | CCCGCTGGAATTGTTCGAGCGTTTTATGCAGTCCCAAACCGATTGC | |
| | | TCCATCGATTGTGCCTGTAAAATTGATGGTGACGAATTGTATCCCG | |
| | | CCCGTTTTAGTCTGGCCCTGTATAACAACCAGTATGCCGAAAAGCA | |
| | | AATTCGCGAAACCATCGACTTCTTCCATCAGGTAGAGGGTCGGACC | |
| | | GAGGTGAAACTGAACTATCAGCAACTGCAGCACTTCCTGGGTGCTG | |
| | | ACTTCGATTTTAGCAAAGTGATTCGAAACCTGGTGGGTGTGGATGC | |
| | | ACGCCGCGAACTGGCTGATTCCCGGGTTAAACTGTATATTTGGATG | |
| | | AACGATTACCCAGAGAAAATGGCGACCGCCATGGCATGGTGCGATG | |
| | | ATAAGAAGGAATTGTCGACGTTGATAGTAAATCAGGAGTTTCTGGT | |
| | | CGGGTTCGATTTTTATTTCGATGGTCGCACGGCAATAGAATTATAC | |
| | | ATTAGTCTGTCATCCGAAGAATTTCAGCAGACACAAGTTTGGGAAC | |
| | | GCCTCGCAAAGGTAGTGTGCGCCCCAGCGCTGCGCCTTGTTAATGA | |
| | | TTGCCAGGCGATCCAGATTGGCGTGAGCCGTGCCAATGATAGTAAG | |
| | | ATCATGTATTACCATACCCTTAATCCGAACTCGTTTATCGACAATC | |
| | | TGGGCAATGAAATGGCAAGCAGAGTTCACGCGTATTACCGACATCA | |
| | | ACCGGTTCGCTCTCTGGTAGTATGCATACCAGAACAGGAGTTGACC | |
| | | GCCCGGTCCATACAGCGCTTAAACATGTATTACTGTATGAAC | |
| lasB | Codon | ATGAAAGGCGAGGAAATGTTGGGACATCCACAGACCGGTTTTGTTG | 487 |
| | optimized | TACTGCCAGACAACGATGCCACCGGCGACGTGACGGGCCGCCTGTT | |
| | | ACCTTGGGGTGATGTAGTTACAGTGTATCCGTCTGGCCGTCCATGG | |
| | | ATCATCGGCAACTGCTGGGATCGCCCAGTCCTCGTCCATGATGGCG | |
| | | TGATCGTCTTGGGTCATACCAGCGTCACGCGTGATCAAATTGCCCG | |
| | | TCATGGGAACGATCCGCATCGCTTACTGGACGAGGCCGACGGCGCA | |
| | | TTTCATGCGGCGGTCCTGATCGGACACGAAGTTCATGTTCGCGGCT | |
| | | CCGCCTACGGTGTCTGTCGTCTGTATACATGCGTTGTTGACGGTGT | |
| | | GACCTTAGTGAGTGATCGTACAGACGTCCTGCAGCGTCTGGCAGGT | |
| | | ACTGATGTGGACGTCGACGTGCTGGCTGGCCACTTGTTAGAGCCGA | |
| | | TCCCGCACTGGTTAGGCGAACAACCGTTATTGACGTCCGTGGAGCC | |
| | | CGTGCCACCGACACATCACGTTATTTTAACTCCGGACGCACGTAGT | |
| | | CGTTTACGGCCATCACGTCGTCGTCGGCCTGAACCGTCGCTGGGTT | |
| | | TGCGGGACGGTGCGGAACTTGTCCGGGAGCGTCTGGCCGCAGCTGT | |
| | | GGCTACCCGTGTGGACAGTCCAGCGTTAATTACCAGTGAACTGAGT | |
| | | GGCGGCTATGATTCCACTAGTGTGTCATACTTGGCAGCGCGCGGTA | |
| | | AAGCCGAGGTGGTGCTGGTCACGGCCGCGGGACGTGACAGCACAAG | |
| | | CGAGGATCTGTGGTGGGCTGAACGCGCAGCCGCAGGGCTCCCGGAA | |
| | | CTCGATCACGTAGTGTTACCTGCGGATGAATTACCGTTTACGTACG | |
| | | CCGGCCTGACGGAGCCTGGTGCACTTTTGGATGAACCGTGTACGGC | |
| | | TGTTGCCGGCCGTGAGCGTGTACTGGCGCTGGTACGTAAAGCCGCG | |
| | | GCCCGCGGCTCTACACTTCATCTGACTGGCCATGGTGGCGATCACC | |
| | | TGTTTACTTCACTGCCGACACCGTTTCATGACCTGTTTCGTACGCG | |
| | | TCCAGTCGCCGCGCTCCGCCAGTTGCGTGCATTTGGCGCGTTGGCT | |
| | | GCGTGGCCGACCCGTAAGCTGATGCGCGAACTCGCGGACCGCCGCG | |
| | | ATCATAGCACCTGGTGGCGCGCGCACGCACGTCCTCAGAATGGCCA | |
| | | GCCGGATCCGCACAGCCCCATGTTAGGCTGGGCAATTCCCCCGACT | |
| | | GTCCCGGCGTGGGTTACTGCTGACGGCGTGCGCGCGATCGAACTTG | |
| | | GGATTTTAGAAATGGCAGAACGCGCGGAGCCCCTTGGTCATGCGCG | |
| | | CGGAGAACACGCTGAGCTGGATTCAATCTTTGAAGGGGCGCGTATG | |
| | | GCCCGTGGCCTCAATCGTATGGCTACGCATGCCGGAGTCCCGCTTG | |
| | | CAGCCCCGTTCCATGACGATCGGGTCGTGGAAGCGTGTCTGTCGAT | |
| | | CCGGCCGGAGGAACGCATTTCTGCATGGCAGTACAAACCCTTACTG | |
| | | AACGCCGCAATGCAGGGTGTGGTGCCGAGCACCGTTCTTGATCGTA | |
| | | GCGCTAAAGATGACGGGAGTATTGATGTGGCCTATGGGCTGCAGGA | |
| | | ACACCGTGATGAACTGGTAGCGCTGTGGGAATCATCACGTCTGGCG | |
| | | GAAACCGGTCTGATTGATGCGGGTATGCTGCGGCGTTTATGCGCGC | |
| | | AGCCGTCCTCCCACGAGCTCGAGCATGGATCCTTGTACGCTACTAT | |
| | | CGCTTGTGAGTTGTGGCTGCGTGGTTTAGATCAGGATCGTACCCAA | |
| | | CGCTAC | |
| lasC | Codon | ATGCCGGTGCAGCTGCGTCGGCATGTGTCTTTTACGGCTACGGAAT | 488 |
| | optimized | ACGGCGGCGTGCTGCTGGATGAAACCAAAGGCGCATACTGGCGTCT | |
| | | GAACACCACAGGCGCCGAAGTTGTTCGCGCCATGGGGGAAGCCGAG | |
| | | CGGGATGAGATTGTACGGCATGTGGTGGCGACCTTCGATGTTGATG | |
| | | CGCAAACCGCAGCCCAGGATGTCGATGTCCTGCTGGCAGAACTTCG | |
| | | TGATGCCGGCCTTGTGGCCTCG | |
| lasD | Codon | ATGTCTGTGAATATGGCTCTCCGTGGCCATGGTATGTCCGGTCGCC | 489 |
| | optimized | GTCGTCGCTTAGATGCCACGCGTGCTCGCCTGGCCGTTGTGGTTGC | |
| | | CCGTGTCCTGAATCTCTTACCGCCGCGCTTAATCCGTCGTTGTTTG | |
| | | CGTGTACTGAGTCGCGGAGCCCGCCCTGCCTCGATTGAGGCAGCAG | |
| | | AAGCTGCTCGTCGTACTGTGGTTGCGGTGAGTCCAGCTGCCGCCGG | |
| | | TGCGTACGGCTGTTTAATCCGCAGCATTGCCACCACCCTGGTTCTT | |
| | | CGTTCACGCGGGCAATGGCCAACCTGGTGTGTTGGTGTACGTGCGG | |
| | | AGCCTCCTTTTGGTGCCCATGCCTGGATTGAAGCAGAGGAGCGGCT | |
| | | GGTGGATGAACCTGGTACTATGCATACTTACCGTCGTCTTATCACC | |
| | | GTTGGTCCACTGTCTCGCAAAGTTCGT | |
| lasF | Codon | ATGTCTATCGAACTGACGCCTAGTTTGGCCGATCTGGTCGATCCAC | 490 |
| | optimized | TTCCAGGTCACGCACTGCGCGCTGCGGCGACATTACGTCTGGCAGA | |
| | | TCTGATTGCGGCTGGTGCAGATACTGCACCGGCATTAGCAGCGGCG | |
| | | GCACGCATTGATGCTGACGCGATCGCGCGTCTTATGCGGTATCTGT | |
| | | GCAGTCGCGGGATTTTTCAAGCACATGAAGGCCGGTACGCGTTGAC | |
| | | TGAATTTAGCGAATTGCTGCTGGATGAAGATCCATCTGGCCTGCGT | |
| | | AAAACCTTAGATCAGGATAGCTATGGGGATCGTTTCGACCGCGCGG | |
| | | TTGCGGAACTGGTGGACGTTGTACGGTCCGGTGAACCTTCTTATCC | |
| | | TCGCCTTTACGGCTCGACGGTTTATGATGACCTGGCAGCCGATCCT | |
| | | GCCCTCGGCGAGGTGTTCGCGGATGTTCGTGGCTTGCACTCCGCAG | |
| | | GGTATGGGGAAGATGTCGCGGCAGTGGCGGGTTGGTCCTCATGCCT | |
| | | GCGCGTTGTCGATCTGGGTGGAGGGACTGGCTCCGTCCTGCTTGCT | |
| | | GTGTTAGAGCGTCACCCGTCCCTGTCAGGCGCAGTACTGGATCTGC | |
| | | CATACGTCGCCCCGCAGGCAAAGAAAGCTCTGCAGGCCTCAGCGTT | |
| | | TGCCCAACGTTGTGAATTTATCAAAGGGAGCTTCTTCGATCCGTTA | |
| | | CCTCCGGCAGACCGTTACCTGTTGTGTAACGTGCTGTTCAACTGGG | |
| | | ATGACGCGCAAGCAGGCGCTATTTTGGCACGCTGTGCGCAGGCGGG | |
| | | CCCTGTGGCCGGAGTAGTGGTAGCCGAACGTTTGATCGATCCGGAT | |
| | | GCGGAAGTGGAACTCGTAGCAGCTCAAGATCTGCGTCTGTTGGCTG | |
| | | TTTGCGGCGGTCGGCAGCGTGGCACCGCTGAATTCGAAGCGCTTGG | |
| | | GGCAGCCCATGGCCTGGCGTTAACCAGCGTTACCCTCACGGCATCT | |
| | | GGTATGAGCCTGCTCCGTTTCGATGTGTGTCGTGCCGGGAGTGCTG | |
| | | GCGGGGAAGTTGTGGAAAAATCT | |
| IcnG | Codon | ATGGACGGAACCAACAAGCGCCTGGAGGACAAGTGGTTTGATATTA | 491 |
| | optimized | ACTTCCTGGAAATGTATACACGCAGCTGCCTGAAAACTTTTGGCTA | |
| | | CTTCGACGAAATTCTGATCGTGAAGAAACGCATCGAGGTCCTGAAG | |
| | | AACGTGCTTGAAAAACAGTACTTGTCTACCAATGATTATGCTGAGG | |
| | | AGTTTTTCGAGCTGAATACCACCTTGGAGAGCATAAAAGAATACAT | |
| | | CAAACTGAATCTGGTCATCGAGAAAGAACCGATCTCAATTTGCATT | |
| | | ATGGTCAAAAACGAAGAACGTTGCATCAAGCGCTGCATTGATAGCG | |
| | | TTGAAATCCTCGCCGAGGAGATAATCATTATCGATACCGGCTCTAC | |
| | | GGATAATACCATTAACATTATTGAGGAATGCGCAAACGACAAAATT | |
| | | AAAGTGTTCTCAAAAGAATGGCGTAACGATTTTTCCGAAATTCGGA | |
| | | ACTATGCCATCGAGAAAGCGAGTAGCGAATGGCTGGTGTTTATAGA | |
| | | TGCCGATGAATATCTGGACGAAGCCTCGGTGCTCAACCTGCTCAGT | |
| | | ACGCTCAACATCTTTAACAATCATAAGCTCAAAGACTCTATTGTCC | |
| | | TGTGCCCCATGATCAACGAAGCCAATAACACCATCCATTTCCGTAC | |
| | | CGGGAAATTTTTCAGAAAAGACTCCGGGATTAAATTCTTTGGTACC | |
| | | TGCCATGAGGAGCCCCGCATTAAAGGCATGCCGAATTCTACCCTGC | |
| | | TGATTCCGATCAAGGTTGATTATCTGCATGACGGCTACCTGGCAAA | |
| | | AGTACAATCAAATAAAGACAAGAAAACCCGTAACATCGAACTGTTA | |
| | | GAAGGTATGGTGGAACTGGAACCGGATAATCCTCGTTGGGCGTATA | |
| | | TGTTTGTGCGCGACGGATTTGCAATCCTCGATAACGAATACATTGA | |
| | | GAAAACTTGTTTGCGGTTTTTACTGCTGGACAAAAACGTACGCATC | |
| | | TGCGTCAACAACCTGCAAGACCATAAATTCACTTTGTCACTCCTGA | |
| | | CGATCCTGGGCCGCCTCTATCTGCGCGAGTGCGAATTCGAGAAAAG | |
| | | CAATCTGATAATTCGCATTCTTGACGAACTCATCCCTAATAGTCTG | |
| | | GATGGTAAATTTCTGGCATTCATGGAGCGATTCAGCAAACTGAAAA | |
| | | TTGAGATTAATACGCTGTTAACGGAGGTCATCGAATATCGTCGTAA | |
| | | CCACGAAGTAGATGAAACCAGTTTAATCAACACACAAGGCTACCAT | |
| | | ATCGACTATGTTCTGTCGATTTTGCTGTTCGAAACGGGTAATTACG | |
| | | CGCAAAGTAAGAAATACTTCGATTTCCTGCAGGAGAACCATTTTCT | |
| | | GGAAGAACTGTTTCAAGACAGCTCTTATTCTATCATACTGAAAATG | |
| | | CTCGAGTCAGTAGAAGAT | |
| ItnMI | Codon | ATGAAGTTTAACAAGAACGTGTTCCCAGAGATCAATGAAACGGATT | 492 |
| | optimized | TCGATAACAATATCAAGCCCCTGCTGGATGAACTGGAATCTCGTAT | |
| | | TACCATTCCGCAGGAGGAACTGAGCTTTTCAAGCATTAACGATGAT | |
| | | TTATTTCGCGAGTTAACCCGCAACGAGGAGTACCCTTACCAGAGCA | |
| | | TTTGTACGATCGTTGCAAACATCGTGATGGATGACGGCAGTGAGAT | |
| | | TTGGCGCAAAGATATTTTTGTTGATTCCAATAGTGTGCGCGAAGCC | |
| | | GTATGCGACATTCTGAGCCAAACGTTATTCCTCTATTTCATCCGCT | |
| | | GCTTCTCCGAACAAATTAAAGACATTCGCAAAACTGATGAGGATAA | |
| | | AGAGTCCACCTACAACCGCTACATTAACCTCCTGTTCAGCTCCAAC | |
| | | TTCAAAATCTTCTCCGACGAATACCCTGTCCTGTGGTATCGGACCA | |
| | | TTCGCATCATCAAAAATCGCTGGTATTCTATCAAGAAATCGTTACT | |
| | | GCTGACTCAAAAACACCGTGTGGAGATCGATAAGCAGTTGGACATC | |
| | | CCGCACAAGATGAAGATTAAAGGCCTGAAAATCGGGGGAGACACGC | |
| | | ATAACGGCGGTGCCACAGTGACCACGATCTTCTTTGAGAAAGGGTA | |
| | | TAAACTGATTTATAAGCCGCGGAGCACATCCGGCGAATTCTCGTAC | |
| | | AAGAAATTTATCGAAAAGATTAACCCGTACCTGAAGAAAGACATGG | |
| | | GAGCGATTAAAGCGATCGATTTCGGTGAATACGGCTTTTCTGAGTA | |
| | | TATTGAGTGTAACACGGATGAAGAGGACATGAAACAGGTCGGTCAG | |
| | | CTTGCATTTTTCATGTACCTGTTGAATGCATCAGATATGCATTATA | |
| | | GCAATGTCATTTGGACCAAACAGGGCCCTGTGCCGATTGATTTAGA | |
| | | AACCTTGTTCCAGCCGGATCGTATTCGCAAAGGCCTGAAGCAGTCG | |
| | | GAAACTAACGCGTACCACAAAATGGAGAAAAGTGTATACGGAACGG | |
| | | GAATTATTCCAATTTCCCTGAGCGTTAAAGGCAAAAAGGGTGAGGT | |
| | | CGACGTCGGCTTTAGTGGAATCCGTGATGAGCGCTCTAGTTCGCCG | |
| | | TTTCGCGTTCTGGAAATTTTGGATGGGTTTTCGAGCGACATCAAAA | |
| | | TCGTGTGGAAAAAGCAGCAGAAGTCTAGCTCCAGCAAAAACAATCT | |
| | | GATTGTCGATCACAAAAAGGAGCGCGAAATCCTTCAGCGTGCCCAG | |
| | | TCCGTCGTAGAAGGTTTCCAGGAAACCTCTAAAATCTTCATGAAAC | |
| | | ATCGTGAGGAATTCATCTCCATTATCTTAGACTCATTCGAGAACAT | |
| | | CAAAATTCGCTACATCCATAACATGACGTTTCGCTACGAACAGTTG | |
| | | CTGCGCACTCTGACGGATGCCGAGCCGGCCCAGAAGATTGAGTTAG | |
| | | ACCGTCTGCTGCTGAGTCGTACCGGAATTCTGTCCATCTCGTCTAG | |
| | | TCCCTACATCTCGCTCTCCGAATGTCAACAGATGTGGCAGGGTGAC | |
| | | GTGCCGTACTTCTACTCGAAGTTTTCGAGCAAAAGTATCTTTGATA | |
| | | CCAATGGCTTCGTTGATGAAATCGAGCTGACGCCCCGCCAGGCATT | |
| | | TATCATCAAAGCCGAAAGTATCACCAACGATGAAGTCGATTTTCAG | |
| | | TCCAAGATCATTAAACTGGCGTTCATGGCACGCTTAAGTGACCCGC | |
| | | ACACAACCAACGACAACAAACTGAATAAAAAGGTGATTATCGAAAG | |
| | | CAACCAGCAGAGCAACAGCAGTGAATCAGGTAACAAAGCCATTTTG | |
| | | TTCCTGAGCGATCTGCTGAAAAATAACGTACTGGAAGATCGTTATA | |
| | | GTCATCTGCCGAAAACTTGGATTGGCCCTGTAGCACGTGATGGCGG | |
| | | TTTGGGTTGGGCGCCGGGCGTGCTGGGATACGATCTGTACTCGGGC | |
| | | CGTACAGGACCTGCGTTAGCATTGGCTGCGGCCGGGCGCGTTTTGA | |
| | | AAGATAAAGACAGTATCGAACTTAGCGCCGACATTTTTAATAAATC | |
| | | GTCCCAGATTCTGCAGGAAAAGACTTACGACTTTCGTAACCTGTTC | |
| | | GCATCAGGTATCGGCGGTTTTAGCGGGATTACCGGTCTGTTTTGGG | |
| | | CGCTGAACGCGGCAGGGAATATTCTGAACAATGATGACTGGATTAA | |
| | | AACCTCGAATCAGAGTATGCTGCTGCTGAATGAGAACATGCTGAAA | |
| | | GTGGACAAAAATTTCTTTGACCTGATTAGCGGCAACTCGGGAGCGA | |
| | | TCGGTATGATGTACCTGACCAATCCAAATTTCTATTTGTCTCGCTC | |
| | | GAAAATTAACGACATTCTGCTGACCACGGACTGCTTGATTACTGAA | |
| | | ATGGAAAAAGACGAAACGAGCGGACTGGCCCATGGCGTGTCTCAGA | |
| | | TCCTGTGGTTCCTTAGCATTATGATGCAACGTCAGCCCTCAAGTGA | |
| | | AATCAAAATCCGCGCGACGATTGTCGACAACATCATCAAGAAGAAG | |
| | | TATACGAATTCCTATGGCGAAATCGAATGCTACTATCCGACTGATG | |
| | | GGCACTCCAAATCCACCTCGTGGTGCAACGGGACAAGTGGGATTCT | |
| | | GGTCGCCTATATTGAGGGGTATAAAGCTAATATCGTGGACAAATCC | |
| | | TCGGTGTATCATATTATTAATCAGATCAACGTCGAACAACTTCAGC | |
| | | ATGATAACATTCCGATCATGTGCCATGGTAGCCTTGGTGTGTATGA | |
| | | ATCGCTTAAATATGCGTCAAAGTACTTTGAAATCGAAACCAAGTAC | |
| | | CTTCTGGATGTGATGCGCAATGGCGGCTGCTCCTCCCAAGAAGTAT | |
| | | TAAAGTACTATGGCAAGGGTAACGGCCGTTACCCGCTGTCACCAGG | |
| | | TTTAATGGCGGGTCAGTCGGGCGCGTTGCTGCACTGTTGCAAACTG | |
| | | GAGGATAACGATATCAGCGTGAGCCCCATTTCACTGATGACG | |
| ltnM2 | Codon | ATGGATCCGAGTATCAAAAAGCTCGTGGATTCTATCATCGAATTCT | 493 |
| | optimized | ACAAAAAGGACATCTACCTGGCATACAAAGAGCTGGAACGCGAAAT | |
| | | CAAAAACATCGATAAGACCATCTACAACACTTCAAATGACGAGATC | |
| | | TTGCGGATTTTTAAAGAGAGCCTGATCAGCATCATCACCGATGATA | |
| | | TTTACCGCCTCTCGATTAAAACCTTCATCTATGAGTTTCACAAGTT | |
| | | TCGTATCGATAACGGGTTTCCGGCTGTCAAAGATAGCGAAAGCGCC | |
| | | TTCAATTATTACATCAGTACCTTTGACGTGAAAACGATCGCTCGCT | |
| | | GGTTTGAGAAATTCCCAATGCTGGAATCCATCATCTCCAGTAGCAT | |
| | | CAAAAACGATTGCACATTTATGGTGGATGTATGTGTCAATTTCATC | |
| | | TTAGACCTGTCGGAATGCGAGAAGATTAATCTGATCTCAGAGGATA | |
| | | GCCGGCTCATCACGATCTCATCCAGCAACTCTGACCCGCACAACGG | |
| | | TGGCACGCGTGTCTTGTTCTTTCGTTTCCACAACGGTGATACCATT | |
| | | CTTTACAAACCCCGCAGCCTGACCGTGGACAAGCTGATCTCTAATA | |
| | | TTTTCGAAGAGGTATTCGAATTCGATGCGACGAACTCGAAAAATCC | |
| | | TATTCCCAAGGTGCTGGATCGGGGTACCTATGGCTGGCAGGAATTC | |
| | | ATTGAGAAGAAATCGATCTCTTCCTCAGAGATTAAGCAGGCCTACT | |
| | | ATAACCTGGGTATCTTTAGCAGTATCTTTACAGTGTTAGGGTCTAC | |
| | | TGATATCCACGATGAAAACTTGATTTTTAAAGGTACGACCCCGTAT | |
| | | TTCATCGATCTGGAAACAGCCCTCTCTCCGCGTATCCGGTATGAAG | |
| | | GTAATGAGGAAAACCTGTTCTATCGGATGAGCTCATCGTTGTTCAC | |
| | | TTCTATCGTGGGGACGACTATTATTCCTGCAAAACTTGCTGTCCAT | |
| | | TCCCAGGAAATTATGATCGGCGCAATTAACACCCCTGCGAAACAGA | |
| | | AAACCAAGAAGGATGGCTTTAACATCATCAACTTCGGCACGGATGC | |
| | | CGTCGATATCGCAAAACAGAATATTGAGGTGGAGCGTATTGCTAAC | |
| | | CCTATGCGCATTAAAAATAACATCGTGAACGATCCGCTGCCGTACC | |
| | | AGAACATCTTTACGCGCGGCTTCAAAGAGGGGATCAAATCCATCAT | |
| | | CCTGAAGAAAGGCTCGATCATTTCCATTCTGAACAACTTCAACAGC | |
| | | CCGATTCGTTACATCATGCGGCCGACGGCAAAATATTATTTGATTC | |
| | | TGGATGCCGCGGTATTTCCCGAAAACCTGTATTCGGAACAGACACT | |
| | | GAACAAAACCCTGAATTAGTTAAAGCCGCCAAAAATCGTGGAAAAT | |
| | | TCCCTGATTTCTAAACAGCTCTTTCTTGCCGAAAAACGCATTCTGT | |
| | | CCGAAGGCGATATTCCGAGCTTCTATGTGCTGGGCAAAGAGAAAAA | |
| | | TATCCGTGCGCAGAACTTCATTAGCGAACAGATCTTCGAGGAAACC | |
| | | GCGGTCGATAACGCGATTCAAATTCTGGAATCCATTTCGCAAGACT | |
| | | GGGTGAATTTTAATGAGCGCCTGATTGCGGAGGGCTTCTCCTATAT | |
| | | TCGTGAACAGAGTCGTGGCTATCTGTCCAGTGATTTTGAGAACTCT | |
| | | GATATTTTCAAAAGCTCACTGACCGAAACAAAGAAGTCCGGTTATA | |
| | | CCGCAATGCTGAAAACAATTATCTCCATGTCGGTCAAGACCTCGGA | |
| | | AAACAAAAAGATCGGTTGGCTGCCAGGCATTTATGATGATTATCCG | |
| | | ATCAGCTATATGAGTGCCGCGTTTTGTTCGTTCCATGATTCCGGCG | |
| | | GTATCATCACTTTGCTTGAACACCACTTTGGGCACTGCTCCCCCGA | |
| | | ATATAACGAGATGAAGCGCGGGCTGCTGGAACTGGGCAAAATGTTG | |
| | | AAAATTAACAATAGTAACCTGAGCATCATCTCCGGCTCAGAGTCTC | |
| | | TGGAATTTCTGTATACGCACCGCGAAGTCGAATGCCTGGAACTGGA | |
| | | ATACATTTTAAACAATTCAGCGGAAATCATGGGCGACGTGTTCCTG | |
| | | GGGAAATTAGGCCTTTATCTTATCCTGGCGAGCTACCTGAAAACAG | |
| | | ACCTGAAAATTTTCCAAGATTTCAGTATCATCTGCCAGAAAAACCT | |
| | | CGAGTTTAAAAAGTTCGGGATCGCGCACGGTGAATTAGGGTATCTG | |
| | | TGGACCATCTTCCGTATTCAAAACAAACTGAAGAACAAAAATGCGT | |
| | | GTCTGAGCATCTATCATGAAGTGTTGAACATTTATAAAGGTAAGCG | |
| | | CATTGAATCCGTGGGATGGTGCAACGGTTTATCGGGTATTCTGATG | |
| | | ATTTTGTCAGAAATGAGCACCGTATTAGAGAAAAATCAAGACTATC | |
| | | TGTTCAAGCTGGCAAATCTGAGCACTAAACTGAATGAGGAATCCGT | |
| | | TGACCTGAGTGTGTGCCACGGCGCCAGCGGGGTGCTTCAAACACTG | |
| | | CTTTTCGTCTATAGCAACACGAACGATAAACGTTATCTCAGCCTGG | |
| | | CCAATAAGTATTGGAAGAAAGTGCTGGATAACAGCATTAAGTACGG | |
| | | TTTCTACAATGGAGAACGCGATAAGGATTATCTGTTGGGATATTTC | |
| | | CAGGGTTGGTCAGGCTTCACGGACAGCGCACTCCTGCTGGATAAAT | |
| | | ACAATAACAATGAGCAAGTGTGGATTCCGATCAACCTGAGCTCCGA | |
| | | TATCTATCAGCATAATCTGAACAACTGCAAAGAGAAGAATTATGAG | |
| | | GGCGATGGCTGCCATAAATCT | |
| lynD | Codon | ATGCAATCTACACCATTACTGCAAATACAACCACATTTCCATGTAG | 494 |
| | optimized | AGGTCATTGAACCAAAGCAAGTCTACTTGTTGGGTGAACAAGCTAA | |
| | | TCATGCATTGACAGGCCAATTATACTGCCAAATTTTGCCATTGTTA | |
| | | AACGGACAATACACATTGGAACAAATCGTTGAAAAACTAGACGGAG | |
| | | AAGTACCACCTGAATACATTGATTATGTGCTGGAGAGACTAGCTGA | |
| | | GAAGGGCTATCTGACTGAAGCAGCACCTGAATTATCTAGTGAAGTG | |
| | | GCCGCTTTCTGGTCTGAGCTGGGGATTGCACCTCCTGTCGCGGCCG | |
| | | AAGCATTACGTCAACCTGTGACTTTAACACCTGTTGGAAACATCAG | |
| | | CGAAGTAACAGTAGCAGCCTTAACCACAGCCCTACGTGATATCGGT | |
| | | ATTTCCGTTCAAACACCTACAGAAGCTGGATCGCCAACTGCATTGA | |
| | | ACGTTGTACTTACCGATGATTATCTCCAACCAGAACTCGCTAAGAT | |
| | | CAATAAGCAAGCCTTAGAAAGTCAACAAACTTGGCTACTTGTCAAA | |
| | | CCAGTTGGCTCCGTGTTATGGTTGGGTCCGGTATTCGTGCCAGGAA | |
| | | AAACAGGTTGCTGGGATTGTTTGGCTCACAGATTAAGGGGGAATAG | |
| | | AGAGGTAGAGGCCTCTGTATTGAGACAAAAACAAGCTCAACAACAA | |
| | | CGTAATGGACAAAGCGGGTCTGTAATAGGATGCCTTCCCACGGCTA | |
| | | GAGCGACACTGCCCTCAACACTCCAAACTGGGCTGCAGTTCGCTGC | |
| | | TACCGAAATTGCTAAATGGATAGTTAAGTATCATGTTAATGCCACA | |
| | | GCGCCTGGCACCGTATTCTTCCCTACATTGGATGGTAAGATAATTA | |
| | | CGCTAAATCACTCCATACTGGATTTGAAGTCACATATTCTGATCAA | |
| | | GCGTTCTCAATGTCCCACCTGTGGTGACCCAAAAATCTTACAGCAC | |
| | | CGTGGTTTCGAACCTTTAAAACTTGAGTCAAGGCCTAAACAGTTCA | |
| | | CCTCAGACGGCGGACATCGTGGTACTACCCCTGAACAAACTGTCCA | |
| | | GAAATATCAACATTTAATCTCGCCTGTTACCGGTGTAGTTACTGAA | |
| | | TTGGTCAGGATAACTGATCCGGCCAATCCACTAGTTCACACATATA | |
| | | GAGCTGGTCATAGCTTCGGGAGCGCTACATCGCTGAGAGGGCTGCG | |
| | | TAATACCTTAAAGCATAAGAGTTCAGGTAAGGGTAAGACTGATTCT | |
| | | CAAAGTAAAGCCTCGGGCCTGTGTGAGGCGGTAGAACGTTACTCAG | |
| | | GAATCTTTCAAGGTGACGAACCGAGAAAACGCGCCACATTGGCTGA | |
| | | ATTGGGAGATTTGGCAATTCACCCTGAGCAATGCTTGTGTTTTTCC | |
| | | GACGGTCAGTACGCTAATAGAGAAACTTTAAACGAACAGGCAACGG | |
| | | TGGCACATGATTGGATACCTCAACGTTTTGATGCATCACAAGCTAT | |
| | | TGAATGGACTCCAGTCTGGTCCCTAACTGAACAGACCCATAAATAT | |
| | | TTGCCCACCGCATTGTGTTACTACCATTATCCTCTACCCCCAGAAC | |
| | | ACAGATTCGCACGTGGAGATTCGAATGGTAATGCTGCCGGAAATAC | |
| | | GTTGGAAGAGGCTATACTCCAAGGCTTCATGGAATTAGTCGAGAGA | |
| | | GATGGTGTGGCTTTATGGTGGTATAACAGGCTACGCAGACCCGCTG | |
| | | TAGACTTAGGCTCATTTAACGAGCCATACTTCGTTCAGTTGCAACA | |
| | | ATTCTACAGAGAAAACGATAGAGATTTGTGGGTTTTGGACTTGACA | |
| | | GCTGATTTAGGTATCCCGGCTTTCGCGGGCGTTTCTAATAGAAAAA | |
| | | CTGGTAGTTCGGAGAGGTTGATATTAGGATTCGGTGCACACCTCGA | |
| | | TCCTACTATTGCAATTCTGAGAGCAGTTACAGAAGTTAACCAGATT | |
| | | GGCCTTGAATTAGATAAAGTTCCAGACGAGAACCTTAAGAGCGACG | |
| | | CAACAGATTGGCTAATTACTGAAAAATTAGCTGACCACCCTTATTT | |
| | | GTTACCAGATACAACTCAACCTCTAAAAACTGCTCAAGATTATCCT | |
| | | AAAAGGTGGTCTGACGATATATACACGGACGTAATGACTTGCGTTA | |
| | | ATATTGCTCAACAAGCAGGACTTGAAACTCTAGTTATTGATCAAAC | |
| | | ACGTCCGGACATTGGTTTGAATGTTGTTAAGGTGACAGTCCCGGGG | |
| | | ATGAGGCACTTTTGGTCAAGATTTGGAGAGGGGAGGCTTTATGACG | |
| | | TGCCCGTCAAATTAGGTTGGCTTGACGAACCTTTGACCGAAGCGCA | |
| | | AATGAACCCCACGCCGATGCCTTTT | |
| mcbCD | Synthesized | ATGTCAAAACACGAACTCTCTTTAGTGGAAGTAACGCATTACACAG | 495 |
| | without codon | ATCCTGAAGTTCTGGCCATTGTTAAAGATTTTCATGTCAGAGGTAA | |
| | optimization | CTTTGCTTCCCTCCCCGAATTTGCTGAACGAACTTTCGTGTCCGCG | |
| | as overlapping | GTACCTCTTGCCCATCTGGAGAAATTTGAAAATAAAGAAGTTCTCT | |
| | reading frames | TCAGGCCAGGTTTCAGCTCCGTAATAAACATATCCTCATCACATAA | |
| | (same as | TTTTAGTCGTGAAAGGCTCCCATCAGGAATAAACTTTTGCGACAAA | |
| | native E. coli | AATAAACTTTCCATTCGTACTATTGAAAAGTTATTAGTCAATGCAT | |
| | cluster) | TCAGCTCACCTGATCCTGGCTCTGTAAGGCGGCCTTATCCTTCTGG | |
| | | GGGGGCATTGTACCCGATTGAAGTTTTTTTATGCAGATTATCTGAA | |
| | | AATACAGAAAACTGGCAGGCAGGAACTAATGTTTATCACTACCTGC | |
| | | CGCTAAGTCAGGCACTAGAACCTGTTGCTACATGTAATACTCAGTC | |
| | | ACTCTACCGAAGCCTGTCCGGTGGGGATTCGGAACGTCTTGGTAAA | |
| | | CCCCATTTTGCTCTCGTCTATTGCATTATTTTTGAAAAAGCTTTGT | |
| | | TCAAATATCGCTACAGAGGATACCGGATGGCCTTAATGGAAACAGG | |
| | | TTCGATGTATCAGAACGCAGTATTGGTTGCAGATCAAATAGGACTG | |
| | | AAAAACCGGGTATGGGCGGGATATACCGATTCATACGTAGCAAAAA | |
| | | CAATGAATCTGGATCAGAGGACTGTAGCGCCACTGATCGTTCAGTT | |
| | | TTTTGGAGATGTAAACGATGATAAATGTCTACAGTAACCTTATGTC | |
| | | CGCATGGCCGGCCACAATGGCCATGAGTCCAAAACTGAACAGAAAT | |
| | | ATGCCAACGTTTTCTCAGATATGGGACTATGAGCGTATTACACCAG | |
| | | CCAGCGCGGCCGGTGAAACTCTGAAGTCAATTCAGGGGGCAATAGG | |
| | | TGAATATTTTGAACGCCGTCATTTTTTTAATGAGATAGTCACCGGT | |
| | | GGTCAGAAAACATTATATGAGATGATGCCTCCATCTGCTGCAAAGG | |
| | | CTTTTACCGAAGCATTTTTTCAGATCTCATCACTGACCCGCGATGA | |
| | | AATCATAACCCATAAATTTAAAACGGTCAGAGCCTTTAATCTGTTT | |
| | | AGCCTTGAACAACAAGAAATACCTGCAGTCATAATTGCACTCGACA | |
| | | ATATAACCGCTGCAGATGATCTGAAATTTTATCCTGACAGAGATAC | |
| | | ATGCGGATGTAGCTTTCATGGTAGTTTGAACGATGCCATAGAAGGT | |
| | | TCCTTGTGTGAATTTATGGAGAGACAGTCCCTCCTTCTTTACTGGT | |
| | | TACAGGGAAAAGCCAATACTGAAATATCCAGTGAAATAGTAACAGG | |
| | | CATAAATCATATAGATGAGATTTTACTGGCTCTCAGGTCAGAAGGA | |
| | | GATATCAGGATTTTCGATATCACCCTGCCCGGAGCTCCTGGACACG | |
| | | CAGTACTAACCCTGTATGGCACAAAAAACAAAATCAGTCGAATAAA | |
| | | ATACAGTACCGGATTATCCTATGCTAATAGTCTGAAAAAAGCACTT | |
| | | TGTAAATCCGTAGTGGAATTGTGGCAATCGTATATATGCCTGCACA | |
| | | ACTTTCTTATTGGCGGTTATACTGATGATGACATTATTGATAGTTA | |
| | | CCAGCGTCACTTTATGTCATGCAACAAGTACGAGTCGTTTACGGAT | |
| | | TTGTGTGAAAATACGGTACTACTGTCTGATGATGTCAAGTTAACGT | |
| | | TTGAGGAAAATATTACGTCAGACACAAATTTATTAAACTATCTTCA | |
| | | ACAAATTTCTGATAATATTTTTGTTTACTATGCCAGGGAAAGAGTA | |
| | | AGTAACAGCCTTGTCTGGTACACAAAAATAGTAAGCCCTGATTTTT | |
| | | TCCTTCATATGAATAACTCAGGTGCAATAAACATTAATAATAAAAT | |
| | | TTACCATACCGGGGACGGTATTAAAGTCAGAGAATCAAAGATGGTA | |
| | | CCATTCCCA | |
| mdnC | Amplified | ATGACCGTTTTAATTGTTACTTTTAGCCACGATAATGAAAGTATTC | 496 |
| | from | CTCTGGTAATCAAAGCCATAGAAGCCATGGGTAAAAAAGCCTTCCG | |
| | pARW071 | TTTTGATACTGATCGCTTCCCTACAGAGGTGAAAGTTGATCTTTAC | |
| | | TCAGGCGGTCAAAAAGGCGGAATTATTACCGATGGAGAACAAAAAT | |
| | | TAGAGCTAAAAGAAGTTTCTTCTGTCTGGTATCGACGCATGAGATA | |
| | | CGGACTAAAATTACCCGATGGGATGGATAGTCAATTTCGCGAAGCT | |
| | | TCTCTTAAGGAATGTCGGTTAAGTATTCGAGGAATGATTGCTAGTT | |
| | | TATCTGGCTTTCATCTTGATCCAATTGCTAAGGTAGATCATGCTAA | |
| | | TCATAAACAATTGCAGTTACAAGTGGCGCAACAATTAGGTTTATTA | |
| | | ATTCCGGGGACTTTAACTTCTAATAATCCTGAAGCTGTCAAGCAAT | |
| | | TTGCTCGGGAGTTTGAAGCGACGGGAATTGTGACTAAAATGCTTTC | |
| | | TCAATTTGCTATTTATGGAGACAAGCAAGAGGAAATGGTTGTTTTT | |
| | | ACCAGTCCTGTTACAAAGGAAGATCTAGATAATTTGGAAGGTTTGC | |
| | | AATTTTGTCCAATGACTTTTCAGGAAAACATTCCTAAAGCTTTGGA | |
| | | ATTACGCATCACTATCGTCGGTGAACAAATATTTACGGCGGCGATT | |
| | | AATTCCCAACAATTAGACGGTGCTATCTACGATTGGCGAAAAGAGG | |
| | | GACGCGCGCTCCATCAACAATGGCAACCCTACGATTTACCGAAAAC | |
| | | TATTGAAAAACAACTACTAGAATTAGTGAAATATTTCGGTCTTAAT | |
| | | TATGGTGCAATTGATATGATTGTCACACCAGATGAACGTTATATCT | |
| | | TTTTAGAAATTAATCCCGTTGGCGAGTTTTTCTGGCTAGAACTTTA | |
| | | TCCTCCTTATTTTCCTATCTCCCAGGCGATCGCTGAAATCCTAGTT | |
| | | AACTCA | |
| mibD | Codon | ATGACGGCACACAGCGACGCAGGAGGTGACCCACGCCCGCCTGAAC | 497 |
| | optimized | GCTTACTGTTGGGGGTGTCAGGAAGTGTCGCTGCACTGAACTTACC | |
| | | GGCGTACATTTATGCCTTTCGGGCAGCCGGTGTGGCACGTCTTGCG | |
| | | GTCGTGCTGACACCAGCGGCTGAAGGGTTCCTTCCAGCGGGTGCGT | |
| | | TACGCCCGATTGTGGATGCCGTTCATACGGAACATGACCAAGGCAA | |
| | | AGGTCACGTAGCGCTGTCACGCTGGGCGCAACACTTACTCGTGCTG | |
| | | CCGGCAACAGCGAATTTGCTTGGCTGTGCAGCGTCAGGACTTGCGC | |
| | | CGAACTTTTTAGCGACCGTTCTGCTCGCGGCAGATTGCCCAATCAC | |
| | | ATTCGTCCCGGCGATGAATCCGGTCATGTGGCGTAAACCAGCCGTA | |
| | | CGCCGGAACGTTGCAACCTTACGCGCAGATGGTCATCACGTGGTGG | |
| | | ATCCTCTGCCGGGCGCTGTGTACGAAGCTGCCTCACGTTCTATCGT | |
| | | GGAAGGTCTTGCTATGCCGCGCCCTGAAGCGTTAGTCCGTTTACTG | |
| | | GGTGGCGGTGATGACGGTTCTCCAGCAGGACCGGCAGGTCCGGTTG | |
| | | GACGCGCAGAGCATGTTGGGGCTGTTGAGGCTGTTGAAGCCGTGGA | |
| | | AGCAGTTGAGGCCGTTGAGGCTGCGGAAGCACTTGCG | |
| mibH | Codon | ATGGCACGTAGTGAGGAATCGAACACTCTGGCACGTCTGTTTGACG | 498 |
| | optimized | TGTTGGGTGACGATGCCGCTGCCGCACGTGAATGGGTAACGGAACC | |
| | | CCATCGTCTGATCGCTAGCAATGAGCGCCTGGGCACAGCTCCGGAA | |
| | | GCCCCGGCGGATGACGATCCGGAGGCCATTCGGACGGTTGGAGTGA | |
| | | TCGGAGGGGGCACAGCCGGGTATTTAACGGCGTTGGCTCTGAAGGC | |
| | | TAAACGCCCTTGGTTGGATGTGGCGCTCGTCGAAAGTGCGGATATC | |
| | | CCGATCATTGGGGTAGGAGAGGCGACGGTGTCTTATATGGTGATGT | |
| | | TTCTGCACCATTATCTGGGCATTGATCCGGCGGAGTTTTACCAACA | |
| | | TGTGCGCCCTACTTGGAAACTGGGCATCCGTTTTGAATGGGGGTCA | |
| | | CGTCCGGAGGGCTTTGTTGCGCCATTCGATTGGGGGACCGGATCTG | |
| | | TTGGCCTGGTTGGGAGCCTGCGTGAAACGGGCAATGTCAACGAAGC | |
| | | TACGTTACAGGCGATGCTCATGACGGAGGATCGCGTTCCGGTATAT | |
| | | CGTGGCGAAGGTGGGCATGTTAGTCTGATGAAATATCTGCCATTCG | |
| | | CATATCATATGGATAACGCTCGCCTGGTTCGCTACCTGACGGAACT | |
| | | CGCCACTCGTCGTGGCGTGCATCATGTCGATGCGACTGTAGCTGAA | |
| | | GTTCGCCTGGATGGTCCTGACCACGTTGGGGACCTGATTACTACGG | |
| | | ACGGTCGTCGCCTGCACTATGACTTTTACGTCGATTGTACTGGATT | |
| | | TCGTTCCCTGCTGCTGGAAAAAGCCCTGGGTATCCCGTTCGAATCT | |
| | | TATGCGTCAAGCCTGTTTACCGACGCGGCAATTACCGGTACCCTTG | |
| | | CACATGGGGGTCATCTTAAACCTTACACTACGGCAACTACCATGAA | |
| | | TGCGGGCTGGTGTTGGACGATCCCTACTCCTGAGTCCGATCACCTG | |
| | | GGGTACGTTTTCAGTAGTGCCGCGATCGATCCAGACGATGCAGCAG | |
| | | CAGAAATGGCCCGCCGTTTCCCGGGCGTTACCCGCGAAGCATTAGT | |
| | | TCGCTTTCGCTCCGGCCGTCACCGTGAAGCTTGGCGCGGCAATGTC | |
| | | ATCGCGGTAGGAAACAGCTATGCTTTCGTGGAACCTCTGGAGAGTT | |
| | | CGGGACTCCTGATGATTGCTACCGCAGTCCAGATCCTGGTGAGTTT | |
| | | GCTGCCGAGTAGTCGTCGTGACCCGCTGCCTAGCAATGTGGCGAAT | |
| | | CAGGCGTTAGCTCACCGGTGGGACGCGATTCGTTGGTTTCTGAGTA | |
| | | TTCATTACCGTTTCAACGGCCGCCTCGATACTCCGTTCTGGAAGGA | |
| | | AGCCCGTGCCGAAACAGATATTAGCGGTATTGAACCGTTGCTTCGT | |
| | | CTGTTCAGTGCCGGTGCCCCTCTGACCGGTCGCGATAGCTTTGCGC | |
| | | GCTATTTGGCCGACGGAGCAGCCCCGTTGTTCTATGGCCTGGAGGG | |
| | | TGTTGATACCTTACTGCTGGGACAGGAAGTGCCTGCGCGTCTGTTA | |
| | | CCACCGCGTGAATCTCCTGAGCAGTGGCGTGCCCGTGCTGCAGCAG | |
| | | CCCGCTCATTAGCCTCGCGTGGCTTACGTCAGAGCGAAGCTCTGGA | |
| | | TGCTTACGCTGCGGACCCCTGTCTCAATGCGGAACTGCTGTCTGAT | |
| | | AGCGACTCATGGGCGGGTGAACGCGTCGCGGTACGTGCAGGTCTGC | |
| | | GT | |
| mibO | Codon | ATGATTTTTGGCCCGGATTTTCATCGCGATCCGTATCCAGTGTATC | 499 |
| | optimized | GTCGTCTGCGTGATGAGGCTCCGTGCCACCATGAACCAGCGTTAGG | |
| | | TCTGTATGCGTTGAGCCGCTACGAGGACGTTCTGGCTGCCCTTCGT | |
| | | CAGCCCACCGTGTTCAGCTCAGCAGCGCGTGCGGTAGCCTCCAGTG | |
| | | CAGCGGGAGCAGGTCCATACCGCGGTGCCGACACCGTTAGTCCGGA | |
| | | GCGGGAAACTGCGGCTGAAGGGCCCGCCCGTAGCCTGTTGTTCCTG | |
| | | GATCCGCCAGAGCACCAGGTGCTGCGTCAGGCGGTGTCCCGTGGCT | |
| | | TTACGCCGCAGGCAGTATTGCGCCTTGAGCCGGCCGTCCGCGACAT | |
| | | TGCGGCGGGTCTTGCTGATCGTATCCCCGATCGCGGTGGTGGCGAG | |
| | | TTCGTTACCGAATTTGCGGCTCCGCTGGCAATCGCAGTGATTCTGC | |
| | | GGTTACTTGGTGTACCGGAAGCAGATCGTGCCCGCGTAAGCGAACT | |
| | | TTTATCGGCATCAGCCCTGTCGGGGGCGGAAGCAGAACTGCGCTCC | |
| | | TATTGGCTGGGCCTTTCGGCACTCCTCCGCGATCGTGAAGATGCAG | |
| | | GCGAAGGTGACGGAGAGGATCGTGGTGTGGTGGCGGCTCTGGTCCG | |
| | | TCCTGATGCTGGACTGCGCGACGCGGATGTTGCCGCAGGACCTGCC | |
| | | GTGCGTGCACCGCTGACGGATGAGCAGGTTGCAGCATTCTGCGCCT | |
| | | TAGTGGGGCAAGCCGGCACTGAAAGTGTGGCAATGGCGCTCTCCAA | |
| | | CGCATTGGTCCTGTTCGGGCGTCACCATGACCAGTGGCGCACACTG | |
| | | TGTGCGCGTCCGGATGCGATTCCAGCAGCATTCGAAGAGGTCCTCC | |
| | | GCTATTGGGCACCTACGCAGCATCAAGGTCGGACGTTAACCGCGGC | |
| | | GGTACGTTTACATGGCCGTCTGCTGCCGGCCGGTGCGCATGTACTG | |
| | | CTGCTGACCGGTTCAGCCGGCCGGGATGAACGTGCGTACCCAGACC | |
| | | CCGATGTATTTGACATCGGTCGCTTCCACCCGGATCGTCGTCCGTC | |
| | | GACCGCGCTGGGTTTTGGTCTGGGCGCACACTTTTGTTTAGGCGCT | |
| | | GCTCTCGCTCGTCTGCAGGCACGCGTAGCGCTGCGCGAACTGACAC | |
| | | GCCGGTTCCCGCGTTATCGTACGGACGAGGAACGCACTGTGCGTTC | |
| | | GGAAGTGATGAACGGGTTCGGCCACAGCCGTGTACCATTTTCCACG | |
| mibS | Codon | ATGACGACTGGCACCACGGTAGCGCATGCTGTAGAACCAGACGGTT | 500 |
| | optimized | TCCGCGCCGTGATGGCCACACTGCCGGCCGCTGTGGCGATCGTTAC | |
| | | GGCAGCTGCGGCAGATGGGCGCCCGTGGGGTATGACCTGCAGTTCG | |
| | | GTTTGCTCAGTGACCTTGACCCCGCCGACCCTTCTGGTCTGCCTTC | |
| | | GGACGGCGTCCCCGACTCTGGCCGCAGTCGTGTCAGGTCGTGCATT | |
| | | TAGCGTGAACCTTCTGTGTGCGCGGGCCTATCCTGTGGCGGAATTG | |
| | | TTTGCATCTGCGGCAGCAGACCGGTTTGATCGCGTTCGTTGGCGTC | |
| | | GCCCGCCGGGTACAGGCGGTCCACATCTTGCCGATGATGCACGTGC | |
| | | AGTGTTAGACTGTCGCCTGAGCGAAAGCGCAGAAGTAGGCGACCAT | |
| | | GTGGTCGTATTTGGCCAAGTCCGGGCGATTCGTCGCCTGAGTGATG | |
| | | AACCACCACTGATGTATGGTTATCGTCGTTACGCACCTTGGCCGGC | |
| | | AGATCGTGGTCCGGGTGCGGCAGGCGGC | |
| paaA | Codon | ATGAGCCTGACGAATGTCAAGCCGTTGATTAAAGAATCCCACCACA | 501 |
| | optimized | TCATTTTAGCTGACGATGGTGACATTTGCATTGGGGAAATTCCGGG | |
| | | GGTGTCTCAGGTAATCAATGACCCGCCGTCGTGGGTTCGTCCTGCC | |
| | | CTGGCAAAGATGGATGGCAAGCGTACTGTCCCCCGTATTTTCAAAG | |
| | | AACTGGTCAGTGAAGGCGTACAGATCGAATCCGAACATCTGGAAGG | |
| | | CCTGGTAGCCGGGCTTGCCGAACGCAAACTTCTCCAGGATAACAGT | |
| | | TTCTTTTCCAAGGTGTTAAGCGGTGAAGAAGTGGAGCGCTATAACC | |
| | | GCCAGATTCTGCAGTTCAGCCTTATCGATGCGGATAACCAGCACCC | |
| | | TTTCGTTTACCAAGAGCGGCTGAAACAGTCTAAAGTCGCTATCTTC | |
| | | GGTATGGGTGGCTGGGGCACGTGGTGTGCATTGCAGCTGGCCATGT | |
| | | CAGGCATTGGTACACTGCGGCTGATCGACGGCGATGATGTGGAACT | |
| | | GTCGAACATTAACCGCCAAGTTCTGTATCGCACGGATGATGTAGGT | |
| | | AAAAACAAAGTTGATGCCGCCAAAGACACTATCCTGGCATACAACG | |
| | | AAAACGTGCATGTTGAAACCTTCTTTGAATTCGCCAGCCCGGACCG | |
| | | TGCCCGGCTTGAAGAACTTGTGGGTGATTCTACCTTTATTATCCTG | |
| | | GCTTGGGCCGCGTTGGGTTACTACCGTAAAGATACGGCAGAGGAAA | |
| | | TTATCCATTCGATTGCGAAAGATAAAGCGATCCCTGTAATTGAACT | |
| | | CGGCGGTGATCCTTTGGAAATCTCTGTCGGTCCTATTTACCTGAAT | |
| | | GATGGCGTACACAGCGGCTTCGACGAGGTGAAAAATTCCGTTAAAG | |
| | | ATAAATACTACGACAGCAACAGCGATATCCGCAAATTTCAAGAGGC | |
| | | GCGGTTGAAACACAGCTTCATCGATGGCGATCGTAAAGTGAACGCG | |
| | | TGGCAATCAGCGCCCAGCCTGAGTATTATGGCTGGTATCGTAACGG | |
| | | ATCAGGTTGTGAAAACCATTACCGGGTACGACAAGCCACATCTCGT | |
| | | TGGCAAGAAATTTATCTTGAGTCTGCAAGATTTCCGCAGCCGCGAG | |
| | | GAGGAGATCTTTAAA | |
| padeK | Codon | ATGACCGAACGTGCCGCAGTGCGTACCGACCATTATAAAGCCTTTG | 502 |
| | optimized | GGTTTAGAATTGAAAGCGATTTCGTGCTCCCGGAACTTCCGCCCGC | |
| | | AGGCGAACGCGAACCGCTCGATAATATTACGGTTCGTCGTACCGAC | |
| | | CTGCAGCCGCTCTGGAATTCTAGTATCCATTTTTACGGAAACTTTG | |
| | | CCATTCTGGATCACGGACGCACGGTTATGTTTCGAGTTCCGGGTGC | |
| | | TGCTATCTATGCGGTACAGGATGCTAGCAGCATATTAGTGTCCCCA | |
| | | TTCGATCAGGCAGAAGAAAACTGGGTACGTCTTTTTATTCTGGGTA | |
| | | CCTGTATTGGGATCATCCTGCTGCAGCGTAAGATTATGCCGCTGCA | |
| | | CGGTAGCGCCGTTGCCATTGATGGCAAAGCCTACGCGATTATCGGC | |
| | | GAATCTGGTGCCGGCAAAAGCACTCTTGCACTGCATCTTGTCAGTA | |
| | | AGGGTTATCCATTGCTTTCGGATGATGTGATTCCGGTCGTTATGAC | |
| | | CCAGGGCTCCCCCTGGGTGGTGCCGTCGTACCCGCAACAAAAACTT | |
| | | TGGGTGGACACTCTGAAGCACATGGGAATGGATAATGCAAACTATA | |
| | | CGCCGCTGTACGAACGTAAAACGAAGTTCGCGGTGCCCGTGGGCAG | |
| | | TAATTTCCACGAAGAACCGCTGCCGTTAGCTAGCATTTTCGAGCTT | |
| | | GTCCCGTGGGATGCGGCAACGCACATTGCCCCGATCCAAGGGATGG | |
| | | AACGCTTTCGTGTCCTGTTCCACCACACTTATCGGAACTTTCTGGT | |
| | | TCAGCCGCTGGGTCTTATGGAATGGCATTTTAAAACTCTGAGCTCG | |
| | | TTCGTTCACCAAATTGGAATGTATCGTCTGCATAGACCTATGGTCG | |
| | | GATTCAGTACCTTAGATTTAACGTCGCACATTCTGAATATAACGCG | |
| | | TCAGGGAGAGAACGATCAA | |
| palS | Codon | ATGGGGAATTTGCGTGATTTCTACCAACTGATGAAAGATAACTATG | 503 |
| | optimized | CGGACTCTAATCTGTTCAAGGATTTGAATCTGATCCACAATATCTC | |
| | | CAACGACATCCAAATTGGAATTAATTGCGATTTCTCTGAAATGCTG | |
| | | GGAGAACTGGTAGGTAATTACGATTCCCTGAACTATCCGTCAATCA | |
| | | CCTGTGGTATTCTGACGTATAATGAAGAACGCTGCATTAAACGTTG | |
| | | TCTGGAAAGTGTGGTGAACGAATTCGATGAGATTATTGTCTTGGAT | |
| | | AGTGTATCCGAGGACAATACCGTGAAAATTATCAAGGAGAATTTCA | |
| | | ACGATGTCAAAGTCTACGTCGAGCCATGGAAGAACGATTTTTCATT | |
| | | TCACCGCAACAAGATCATTAATCTCGCAACGTGCGACTGGATCTAC | |
| | | TTTATCGACGCGGATAATTATTATGATTCGAAGAACAAGGGTAAAG | |
| | | CCATGCGCATCGCTAAGGTTATGGATTTCTTGAAAATCGAAGGCGT | |
| | | TGTGAGCCCAACGGTCATTGAGCATGACAATAGCATGAGCCGTGAT | |
| | | ACCCGTAAGATGTTTCGTCTGAAAGATAACATTCTGTTTAGCGGTA | |
| | | AAGTTCATGAAGAACCGGTGTATGCCAATGGTGAGATCCCCCGGAA | |
| | | CATCATAGTAGACATCAACGTGTTTCACGACGGCTATAACCCAAAG | |
| | | ATTATCAACATGATGGAAAAGAACGAGCGCAATATCACCCTGACTA | |
| | | AAGAGATGATGAAGATCGAACCGAACAATCCGAAATGGCTGTACTT | |
| | | CTATAGCCGCGAACTCTATCAGACGCAACGTGACATTGCCCTTGTG | |
| | | CAAAGTGTACTGTTCAAGGCACTGGAACTGTATGAAAACAGTTCAT | |
| | | ATACGCGTTATTATGTTGACACCATTGCCTTACTGTGCCGAGTGCT | |
| | | GTTCGAATCTAAAAACTACCAGAAACTTACGGAATGTCTGAACATC | |
| | | CTGGAGAACAATACGCTTAACTGTTCCGATATCGATTACTATAATT | |
| | | CAGCGCTGCTGTTCTACAACCTGTTACTGCGCATCAAGAAAATTAG | |
| | | CTCCACCCTGAAGGAGAACATTGATATGTACGAACGTGACTATCAT | |
| | | AGCTTTATCAACCCCTCGCATGATCACATTAAGATTCTGATATTAA | |
| | | ATATGCTCCTGCTGCTCGGCGATTACCAGGATGCCTTTAAGGTTTA | |
| | | CAAGGAGATCAAGTCCATTGAGATTAAAGATGAGTTTCTGGTGAAC | |
| | | GTGAACAAATTCAAAGACAATCTTCTGAGCTTCATTGACTCCATTA | |
| | | ACAAAATT | |
| papB | Codon | ATGGCAAACCTGATCCAGGACCGCGAGGACGAACTGATTCATTTCC | 504 |
| | optimized | ATCCGTACAAACTGTTCGAGGTGGATTCAAAAACCTTCTTCTATAA | |
| | | CGTAGTCACCAACGCGATTTTTGAAATTGATAGCCTGATAATCGAC | |
| | | ATTCTTCACTCAAAAGGTAAAAATGAGGAGCACGTTGTGAAAGATT | |
| | | TGGCTGAACGCTATGAGCTGTCTCAGGTTCGCGAAGCGATCCAGAA | |
| | | CATGAAAGAGGCATACATTATAGCAACCGATGCTAACATCTCCGAC | |
| | | GTAGAGAAGATGGGTATCTTAGATAACTCGCAGCGCGTTTTTAAAC | |
| | | TGTCTAGCCTGACGCTCTTTATGGTGCAGGAATGCAACCTGCGGTG | |
| | | TACGTATTGTTACGGCGAAGAAGGAGAATACAACCAGAAAGGTAAA | |
| | | ATGACGTCCGAAATCGCCCGGAGCGCAGTGGATTTTCTGATTCAAC | |
| | | AGAGTGGTGAAATCGAACAGTTGAACATCACATTCTTTGGAGGCGA | |
| | | ACCGCTGCTCAACTTTCCATTAATACAAGAAACCGTGCAGTATGTG | |
| | | CACGAACAGAGCGAGATCCATAACAAGAAATTTAGCTTTTCCATCA | |
| | | CCACCAATGGCACGCTCATTACCCCCAAAATCAAAAACTTCTTCTA | |
| | | TAAACACCACTTTGCAGTCCAGACTTCTATCGATGGTGATGAAAAG | |
| | | ACGCACAATTTCAATCGCTTCTTCAAAGGAGGCCAGGGCTCTTATG | |
| | | ATCTGCTGTTAAAGCGGACGGAAGAAATGCGCAATGACCGTAAAAT | |
| | | TGGTGCACGTGGAACCGTGACCCCTGCCGAGCTGGACCTCTCAAAA | |
| | | TCATTTGACCACTTAGTTAAACTCGGCTTTCGCAAAATCTACTTAT | |
| | | CACCCGCTTTATATAGTCTCTCTGACGATCACTACGACACCCTGAG | |
| | | CAAAGAGATGGTCAAACTTGTTGAACAATTCCGTGAGCTGCTGGAG | |
| | | CGTGAAGATTACGTCACCGCGAAGAAAATGTCTAATGTTCTGGGTA | |
| | | TGTTATCGAAGATTCACTCCGGTGGCCCGCGCATTCATTTTTGCGG | |
| | | TGCCGGCACTAATGCTGCCGCTGTCGATGTCCGCGGCAACCTTTTC | |
| | | CCGTGTCATCGTTTCGTGGGTGAAGATGAATGTTCAATCGGTAACC | |
| | | TGTTCGACGAGGACCCGCTGTCAAAACAGTACAACTTTATAGAGAA | |
| | | TTCTACAGTACGCAACCGTACTACGTGTTCGAAATGCTGGGCGAAG | |
| | | AATCTGTGCGGCGGTGGTTGTCACCAAGAAAATTTCGCCGAGAATG | |
| | | GTAATGTGAACCAGCCAGTGGGCAAATTATGCAAAGTGACCAAAAA | |
| | | CTTCATCAACGCGACCATCAATCTGTACTTGCAACTTACTCAAGAA | |
| | | CAACGCAGCATTCTGTTCGGC | |
| papoK | Codon | ATGCACGATCGTAGCGCGAATGTTAGCTGGACCAAATACATCGCGT | 505 |
| | optimized | TTGGTCTGCGCATTGCCAGCGAACTCAACTTACCGGAACTGATATT | |
| | | GGCGGCTCCCGAAGCCGTTGAGGATGTTGTCATACGCCAGGCAGAT | |
| | | CTCACGGCCTGGTCTGGCCAACTTGAACAGGCAAATTTTGTCATGT | |
| | | TGGACGAACGTTTCATGTTTCAGATCCCGGGGACCGCCATTTATGC | |
| | | GGTACGCGAAGGCAAAGAGATTGAAGTGAGCATCTTCTCTGGGGCC | |
| | | GACCCGGACACCGTGCGCCTTTTCGTGCTGGGGACGTGCATGGGCG | |
| | | TGCTCTTGATGCAGCGCCGCATTCTGCCTATCCACGGCTCCGCCGT | |
| | | CGTTATCGGTGGCCGCGCGTATGCCTTTGTTGGTGAATCAGGCACA | |
| | | GGTAAATCGACCTTAGCTGCAGCATTTCGGCAGGCCGGTTACCAAA | |
| | | TGGTTAGCGATGATGTCATTGCCGTCAAAGCGACCGCATCTAGCGC | |
| | | TATTGTTTACCCTGCGTATCCACAGCAAAAACTGGGTTTAGATTCG | |
| | | CTGTTGCAGCTTGAAGCGCTCCGTGAGAATAAGCACGCCCGCAAGC | |
| | | GTAACAACATCCGTTCTCTGACGGATGGCAATAGTGTGATGCCGCA | |
| | | GTACAGCGATCTGCGCATGCTGGCGGGGGAACTGAATAAATATGCA | |
| | | GTTCCAGCCGTCGATGAATTCTTTAATGACCCGCTGCCGTTGGGCG | |
| | | GTGTTTTCGAACTGGTAGCAGACAGTCCGATTCGAGCATTAATGCG | |
| | | CGAAGGCGAACTCGTCGCTGTGACCGAGCAACCGCTGAACGTTCTG | |
| | | GAATGTTTACATACTCTTCTGCAACACACGTACCGTCGGGTAATCA | |
| | | TCCCTCGAATGGGACTGAGCGAGTGGAGCTTCGATACTGCGGCCCG | |
| | | AATGGCACGCAAGGTCGAGGGCTGGCGACTCCTCCGTGATAGCTCC | |
| | | GTGTTCACGGCTAGTGAAGTCGTCCAGCGCGTCCTCGACATCATCC | |
| | | GTAAGGAGGAAAAGAGCTACGGATCACAC | |
| pbtM1 | Codon | ATGCTGTCTAGCGCGCTGGAGGTGGATATCGATGAAGCTGCGGTGG | 506 |
| | optimized | CGGCGGACTTACGCGAATTGGCCGCAGCTCTGGATCGCAGTGGTTA | |
| | | TGGTGAAATCCTCACCTGTTTTCTGCCTCAGAAGGCACAGGCGCAT | |
| | | ATCTGGGCTCAGACCGCTGCAAAAATTGATGGGCCGTTGCGTACCC | |
| | | TGATGGAATTATTCCTTCTGGGTCGGGCGGTTCCCCAGGATGATCT | |
| | | CCCGCCTCGCATCGCGGCCGTGATTCCCGGTTTAGTTAGCGCAGGT | |
| | | CTGGTTAAGACTGGACAGGGCGCGGTTTGGCTGCCGAACTTGATTC | |
| | | TGCTGCGTCCTATGGGCCAGTGGTTATGGTGTCAGCGGCCTCACCC | |
| | | CTCACCGACCATGTACTTTGGTGACGATAGCCTGGCGCTGGTTCAC | |
| | | CGGATGGTAACATATCGTGGCGGCCGTGCCCTGGATTTATGTGCAG | |
| | | GTCCGGGTGTTCAGGCCCTTACCGCAGCCCTCCGCTCAGAGCACGT | |
| | | TACCGCGGTTGAGATCAATCCGGTCGCGGCAGCCCTTTGCCGCACC | |
| | | AACATTGCCATGAACGGTCTGTCCGACCGCATGGAGGTTCGCCTGG | |
| | | GCTCACTGTACGACGTCGTGCGCGGTGAGGTTTTTGATGATATTGT | |
| | | ATCAAACCCGCCGCTGCTGCCTGTTCCGGAGGATGTGCAATTCGCC | |
| | | TTTGTGGGAGATGGCGGACGCGATGGTTTCGATATTTCTTGGACGA | |
| | | TTCTGGATGGCCTGCCTGAACATCTGTCCGACCGTGGTGCGTGTCG | |
| | | CATCGTTGGTTGTGTTCTGTCCGATGGCTATGTGCCTGTTGTGATG | |
| | | GAAGGCTTGGGAGAATGGGCCGCTAAACACGATTTCGACGTGCTTC | |
| | | TTACAGTGACCGCACATGTCGAGGCGCATAAAGATAGTAGTTTTCT | |
| | | GCGTTCAATGAGCCTGATGAGTTCGGCGATCTCAGGCCGCCCAGCG | |
| | | GAGGAGCTGCAAGAACGGTACGCAGCTGATTATGCCGAACTGGGCG | |
| | | GTTCCCACGTTGCGTTCTATGAACTGTGTGCCCGCCGTGGTGGGGG | |
| | | TTCTGCACGTCTGGCCGACGTGAGCGCTACAAAACGCAGTGCGGAA | |
| | | GTGTGGTTTGTT | |
| pbtO | Codon | ATGACCCAGTATCCCCTGTCGCGTCCAGAACCGCTGGGCGTGCACC | 507 |
| | optimized | CAGATTATCGTCGCCTGCGTGAGACTTGCCCGGTTGCACGTGTGGG | |
| | | TAGCCCGTATGGCCCAGCGTGGCTTGTCACCCGTTACGCCGATGTG | |
| | | GCCGCAGTTCTGACCGATGCCCGTTTTAGTCGTGCAGCCGCTCCGG | |
| | | AAGATGATGGTGGCATCCTGCTGAACACCGATCCGCCGGAACATGA | |
| | | TCGTCTGCGTAAACTGATTGTAGCACACACAGGCACCGCTCGCGTG | |
| | | GAACGGCTGCGTCCGCGTGCTGAAGAGATCGCTGTTGCGTTAGCGC | |
| | | GCCGTATCCCGGGCGAAGGCGAATTCATTAGTGCATTTGCCGAGCC | |
| | | CTTCAGCCATCGCGTTTTGTCTTTATTTGTTGGCCATCTTGTTGGG | |
| | | TTACCAGCGCAGGACCTGGGCCCCTTAGCGACCGTAGTGACTCTGG | |
| | | CACCCGTTCCCGACCGCGAACGTGGCGCGGCATTTGCAGAGCTGTG | |
| | | TCGTCGGCTGGGTCGTCAGGTGGATCGCGAAACGCTTGCAGTAGTT | |
| | | TTAAACGTGGTCTTTGGCGGACATGCGGCTGTAGTGGCCGCGCTGG | |
| | | GTTATTGCCTGTTAGCTGCATTAGATGCGCCACTGCCACGTCTGGC | |
| | | CGGTGACCCAGAGGGCATTGCCGAACTGGTGGAAGAAACCCTTCGT | |
| | | TTGGCTCCACCGGGAGATCGTACACTGTTGCGTCGTACTACAGAAC | |
| | | CTGTGGAACTTGGCGGTCGCACATTACCAGCGGGTGCGCTTGTAAT | |
| | | CCCGTCCATTGCAGCCGCAAACCGTGATCCGGATCGCCCTGTGGGC | |
| | | CGTCGTATGCCACGTCATCTTGCATTTGGACGTGGAGCGCATGCCT | |
| | | GTTTAGGCATGGCGCTGGCGCGCATGGAACTCCAGGCAGCACTGAA | |
| | | AGCGTTAGCGGAACACGCGCCAGACGTACGGTTGCCGGCTGGTACA | |
| | | GGCGCGCTGGTCCGCACACACGAAGAACTCTCGGTGAGCCCGCTCG | |
| | | CAGGAATCCCAATTCAACGC | |
| pcpX | Codon | ATGACATACCGTCGCACCTCCTATGCGGTATGGGAGATCACGCTGA | 508 |
| | optimized | AATGCAATCTGGCATGTTCGCACTGTGGAAGTCGTGCCGGGCACAC | |
| | | GCGAGCAAAAGAACTGTCCACACAGGAAGCGCTGGATCTGGTCCGT | |
| | | CAGATGGCTGATGTCGGCATTATCGAAGTTACTCTGATTGGGGGTG | |
| | | AAGCGTTCCTGCGTCCAGACTGGCTGCAGATTGCCGAGGCGATAAC | |
| | | GAAAGCCGGGATGCTGTGCAGCATGACTACGGGCGGTTATGGCATA | |
| | | TCGCTGGAAACCGCCCGCAAAATGAAAGCGGCAGGAATCGCGAGCG | |
| | | TGAGCGTTAGCATCGATGGCTTGGAGGAAACCCATGATCGCTTACG | |
| | | CGGTCGCAAAGGCTCTTGGCAGGCTGCGTTTAAAACAATGAGCCAT | |
| | | TTGAGAGAAGTGGGCATCTTCTTTGGCTGTAACACCCAGATTAACC | |
| | | GTCTGTCGGCCCCTGAATTTCCGCTGATATATGAACGCATCCGTGA | |
| | | CGCCGGGGCACGTGCCTGGCAGATCCAGCTTACGGTGCCGATGGGC | |
| | | CGCGCTGCCGATAACGCAAATATCCTTCTGCAACCGTACGAACTGC | |
| | | TTGATCTGTATCCGATGATTGCTCGAGTGGCCCGCCGGGCCCGTCA | |
| | | AGAGGGCGTGCAAATCCAGCCAGGTAATAATATTGGGTATTACGGC | |
| | | CCTTACGAACGTCTTTTACGTGGCCGGGGGAGCGATAGTGAGTGGG | |
| | | CATTTTGGCAGGGCTGTGCCGCGGGCTTAAGTACCCTGGGTATTGA | |
| | | AGCGGATGGTGCTATAAAAGGTTGTCCCTCACTGCCAACGAGCGCG | |
| | | TATACCGGCGGTAACATTCGCGAACATAGTCTGCGAGAAATAGTGG | |
| | | AAGAATCGGAACAGCTGCGTTTTAACCTCGGTGCAGGGACGAGCCA | |
| | | AGGGACCGCCCACTTGTGGGGCTTTTGCCAGACGTGTGAATTTAGT | |
| | | GAATTGTGCAGAGGTGGTTGTACGTGGACAGCTCACGTGTTCTTTA | |
| | | ACCGCCGTGGGAATAACCCGTATTGTCATCATCGGGCGCTTTTCCA | |
| | | AGCGGAGCAGGGTATCAGAGAACGTGTCGTGCCAAAGGTCGAAGCT | |
| | | CAGGGCCTGCCGTTTGACAACGGTGAATTTGAACTTATCGAAGAAC | |
| | | CTATTGACGCGCCTCTGCCCGAAAATGATCCACTGCACTTTACCAG | |
| | | CGACTTAGTGCAGTGGTCAGCGAGTTGGCAGGAAGAATCGGAATCT | |
| | | ATAGGCGCAGTGGTAGAC | |
| pcpY | Codon | ATGGTGGAAAACATTGATAATGAACGTGAGAAAAGTGCGAACGAAA | 509 |
| | optimized | TTGAACCGGAAAGCCTGCTTCTGCCGCGCCAGGCTTGGCAGTCGCA | |
| | | GATCGCCTATCTTAAAGCGATTCTGAAAGCCAAACAGGCGCTTGAC | |
| | | CGGATCGAAAAACGTTATCTGCGG | |
| plpX | Codon | ATGACCAAAAAGTATCGGCGTGTATCCTACGCAGTGTGGGAAATCA | 510 |
| | optimized | CCCTGAAATGCAATCTGGCATGCTCTCATTGTGGCAGCCGCGCCGG | |
| | | CCAAGCCCGTACGAAAGAGCTGAGTACCGAAGAAGCGTTCAACCTG | |
| | | GTCCGCCAGCTGGCCGACGTGGGCATTAAGGAAGTCACCCTGATCG | |
| | | GTGGTGAAGCCTTTATGCGTTCGGATTGGCTGGAAATCGCGAAAGC | |
| | | CGTCACTGAAGCCGGCATGATCTGTGGCATGACCACAGGGGGCTTC | |
| | | GGGGTCAGTCTGGAAACGGCGCGTAAAATGAAAGAAGCGGGCATTA | |
| | | AAACGGTGAGCGTTAGCATTGACGGTGGTATTCCTGAAACCCACGA | |
| | | CCGCCAGCGCGGTAAAAAGGGTGCGTGGCATAGTGCATTCCGGACT | |
| | | ATGAGCCATCTGAAAGAAGTCGGGATCTACTTCGGTTGCAACACTC | |
| | | AAATCAATCGTTTATCGGCGTCAGAATTCCCGATTATCTATGAACG | |
| | | TATTCGCGATGCTGGGGCACGTGCGTGGCAAATTCAGCTGACGGTT | |
| | | CCGATGGGCAACGCCGCGGATAACGCAGATATGCTGCTGCAACCGT | |
| | | ATGAATTGCTCGACATCTATCCGATGTTAGCCCGCGTTGCCAAACG | |
| | | TGCGAAACAGGAAGGCGTGCGTATTCAGGCAGGTAACAACATCGGG | |
| | | TACTATGGACCGTATGAGCGTCTGCTGCGTGGCAGCGACGAATGGA | |
| | | CGTTTTGGCAAGGATGTGGTGCGGGCCTTAACACCCTCGGCATCGA | |
| | | AGCCGACGGCAAAATCAAAGGCTGTCCATCCCTGCCGACCGCCGCG | |
| | | TACACCGGCGGTAACATTCGCGATCGCCCGCTGCGGGAAATCGTCG | |
| | | AACAGACCGAAGAACTGAAATTTAACTTAAAAGCTGGTACAGAACA | |
| | | AGGTACGGACCATATGTGGGGCTTTTGTAAAACCTGCGAATTCGCG | |
| | | GAACTCTGTCGCGGCGGATGCAGCTGGACTGCGCATGTGTTCTTTG | |
| | | ACCGGCGCGGCAATAATCCGTACTGCCACCATCGGGCTCTGAAACA | |
| | | AGCCCAAAAAGACATTCGCGAACGCTTTTATTTAAAAGTGAAAGCA | |
| | | AAGGGCAACCCGTTCGACAATGGTGAATTTGTTATCATTGAAGAAC | |
| | | CTTTTAACGCTCCGTTACCCGAGAATGACCTGCTGCACTTTAACAG | |
| | | TGATCACATTCAATGGCCAGAAAACTGGCAAAATAGTGAAAGCGCG | |
| | | TACGCATTGGCCAAG | |
| plpY | Codon | ATGAACAGTAATCAGATCCCTAACAAAGTTGCAACCGCGGCACAGA | 511 |
| | optimized | AATCTGACGACAGCAGCAGCGTATTACCGCGCCAGGGGTGGCAAGA | |
| | | CAAACAAGCCTTTATTAAGGCACTCATTAAAGCCAAACAGTCTCTC | |
| | | GAAATTGCCGAAATTAGCAACTTTTTAACC | |
| procM | Codon | ATGGAGAGTCCTAGCTCATGGAAAACATCGTGGCTGGCCGCCATCG | 512 |
| | optimized | CTCCGGATGAACCCCACAAATTCGACCGCCGCTTAGAATGGGACGA | |
| | | GCTTTCAGAGGAGAACTTCTTCGCAGCACTGAACTCAGAACCTGCA | |
| | | TCGTTGGAAGAGGATGATCCATGTTTTGAAGAAGCACTGCAAGACG | |
| | | CCCTGGAGGCCTTGAAGGCAGCATGGGATTTACCCCTTCTTCCCGT | |
| | | CGATAATAATCTTAATCGTCCCTTCGTAGATGTCTGGTGGCCCATT | |
| | | CGCTGTCACTCTGCGGAGAGCTTGCGTCAAAGCTTCGTCAGTGATA | |
| | | GTGCTGGACTTGCGGACGAGATTTTTGATCAGCTGGCCGATTCGTT | |
| | | ACTGGACCGTCTGTGCGCCCTGGGAGATCAGGTGTTGTGGGAGGCG | |
| | | TTTAACAAGGAGCGTACACCAGGAACGATGTTGTTAGCCCACTTAG | |
| | | GAGCCGCAGGCGACGGCTCCGGACCCCCTGTACGTGAGCATTACGA | |
| | | ACGTTTTATTCAGTCTCACCGCCGTAATGGATTAGCGCCTTTGCTT | |
| | | AAGGAATTCCCTGTACTGGGCCGCCTTATTGGAACAGTTTTGTCCC | |
| | | TTTGGTTCCAAGGGAGCGTGGAAATGCTGCAACGTATCTGCGCTGA | |
| | | CCGCACCGTTCTGCAACAGTGTTTCGCTATCCCTTGCGGGCATCAC | |
| | | CTGAAAACTGTAAAGCAGGGACTTTCTGATCCACACCGCGGCGGTC | |
| | | GCGCTGTGGCAGTTTTGGAATTTGCGGACCCAAATTCCACCGCTAA | |
| | | TTCAAGTATGCACGTAGTGTATAAACCGAAGGATATGGCTGTGGAT | |
| | | GCAGCTTACCAGGCCACCTTAGCAGATCTTAATACTCATAGCGACC | |
| | | TTTCCCCGTTGCGCACGCTTGCCATTCATAACGGCAACGGATATGG | |
| | | TTACATGGAACATGTGGTTCACCATCTTTGCGCTAACGACAAAGAG | |
| | | CTGACAAATTTCTATTTCAACGCTGGGCGTTTAACCGCGCTTCTGC | |
| | | ATCTTCTTGGATGTACTGACTGTCACCATGAAAATTTGATTGCATG | |
| | | TGGTGATCAATTACTGTTGATCGATACAGAAACATTATTGGAGGCG | |
| | | GATTTACCCGATCACATTTCGGATGCTTCGAGCACCACGGCGCAAC | |
| | | CAAAGCCTAGTAGCCTTCAAAAGCAATTTCAGCGTTCTGTTTTGCG | |
| | | TAGCGGGTTACTTCCTCAATGGATGTTCCTGGGGGAGTCGAAGTTG | |
| | | GCCATCGACATCTCGGCTCTGGGAATGTCCCCACCCAATAAGCCTG | |
| | | AGCGTATTGCACTTGGCTGGTTAGGATTCAATTCTGACGGGATGAT | |
| | | GCCTGGGCGTGTATCCCAACCAGTTGAGATTCCTACATCCTTGCCC | |
| | | GTTGGGATTGGTGAGGTTAATCCCTTTGATCGTTTTTTAGAGGATT | |
| | | TTTGTGATGGCTTTTCCATGCAATCAGAGGCCCTTATTAAGCTTCG | |
| | | CAACCGTTGGCTGGACGTTAATGGGGTTCTTGCTCATTTCGCGGGT | |
| | | CTGCCCCGCCGTATCGTTCTTCGCGCGACTCGCGTATACTTCACTA | |
| | | TCCAGCGTCAGCAGTTAGAGCCTACGGCACTGCGCTCTCCACTTGC | |
| | | ACAGGCCTTGAAACTTGAGCAGCTTACTCGTTCTTTCTTGTTGGCA | |
| | | GAGTCAAAGCCTCTTCACTGGCCCATTTTCGCAGCTGAAGTAAAGC | |
| | | AGATGCAGCACCTTGACATTCCTTTCTTCACACACTTAATCGACGC | |
| | | TGACGCTCTGCAGCTGGGCGGCCTGGAACAAGAATTACCAGGCTTC | |
| | | ATCCAGACTAGTGGCTTGGCAGCTGCTTACGAGCGTTTGCGTAATT | |
| | | TAGATACGGACGAGATTGCTTTCCAACTTCGTCTGATCCGCGGTGC | |
| | | AGTAGAGGCTCGCGAGTTGCATACTACGCCGGAGTCGAGCCCGACG | |
| | | TTGCCGCCGCCTGCCACCCCCGAGGCTCTTATGTCCTCTTCAGCCG | |
| | | AGACTAGTTTAGAAGCTGCTAAGCGCATCGCTCACCGCTTACTGGA | |
| | | GTTGGCAATTCGTGATTCTCAAGGGCAAGTAGAATGGCTGGGCATG | |
| | | GATCTGGGGGCAGATGGAGAGAGCTTCTCCTTTGGCCCAGTTGGCT | |
| | | TGAGCCTTTATGGGGGCTCAATCGGTATCGCTCACCTTCTGCAACG | |
| | | TTTGCAGGCGCAGCAAGTTTCCTTGATGGACGCAGACGCTATCCAA | |
| | | ACGGCAATTTTACAGCCCCTTGTGGGACTGGTTGATCAACCTAGCG | |
| | | ACGACGGACGTCGCCGTTGGTGGCGTGATCAGCCGCTGGGCTTAAG | |
| | | TGGATGTGGCGGTACCTTGCTTGCACTTACACTTCAAGGTGAACAA | |
| | | GCGATGGCTAATTCCCTGCTGGCCGCTGCTTTGCCCCGTTTTATCG | |
| | | AGGCTGATCAGCAACTTGACCTGATTGGTGGCTGCGCTGGACTGAT | |
| | | CGGTTCGTTGGTACAATTAGGTACTGAAAGTGCCTTACAATTAGCT | |
| | | TTGCGTGCGGGCGACCATCTTATTGCGCAACAGAATGAAGAGGGGG | |
| | | CGTGGTCTAGCTCGTCATCACAGCCCGGTTTGTTGGGCTTTAGTCA | |
| | | TGGTACTGCAGGTTACGCAGCAGCCTTAGCACACTTACATGCATTT | |
| | | TCCGCTGATGAGCGTTACCGCACCGCAGCCGCTGCCGCTTTAGCAT | |
| | | ACGAACGCGCACGTTTTAATAAAGATGCCGGCAACTGGCCAGACTA | |
| | | CCGCTCGATCGGACGTGACTCTGATTCAGATGAACCGTCCTTTATG | |
| | | GCTTCCTGGTGTCACGGCGCACCCGGCATTGCCCTGGGCCGCGCCT | |
| | | GTTTGTGGGGTACGGCGCTTTGGGACGAAGAATGCACCAAGGAGAT | |
| | | CGGAATTGGGTTACAGACCACAGCTGCTGTTTCGTCTGTTAGTACT | |
| | | GACCACCTGTGTTGTGGTTCACTTGGCCTTATGGTATTATTAGAGA | |
| | | TGCTGTCAGCAGGACCCTGGCCCATCGACAATCAATTACGTTCCCA | |
| | | TTGCCAGGACGTAGCATTCCAGTACCGCCTGCAGGCTTTGCAGCGC | |
| | | TGTTCAGCCGAGCCGATTAAGCTTCGTTGCTTCGGTACAAAAGAGG | |
| | | GCCTTTTAGTCCTGCCTGGATTTTTCACTGGCTTATCAGGAATGGG | |
| | | TTTAGCACTGCTTGAGGATGATCCATCTCGCGCCGTGGTTTCTCAA | |
| | | CTGATCAGTGCGGGCTTATGGCCGACAGAG | |
| psnB | Codon | ATGACGAATTTAGACACGAGCATTGTGGTCGTAGGAAGTCCGGATG | 513 |
| | optimized | ATCTTCACGTCCAGTCAGTGACGGAGGGTCTGCGTGCACGCGGTCA | |
| | | CGAGCCTTACGTGTTTGACACCCAACGTTTTCCGGAAGAGATGACA | |
| | | GTGTCACTTGGTGAACAGGGTGCCTCTATTTTTGTCGATGGCCAGC | |
| | | AAATTGCACGTCCGGCGGCGGTGTACCTCCGTTCACTGTACCAGAG | |
| | | CCCCGGCGCGTATGGGGTGGATGCCGACAAAGCGATGCAGGATAAC | |
| | | TGGCGCCGCACATTGCTCGCTTTTCGCGAGCGTAGTACCCTGATGA | |
| | | GCGCTGTGCTTCTGCGTTGGGAAGAAGCGGGGACTGCAGTGTATAA | |
| | | TTCGCCACGCGCGTCGGCGAATATCACTAAACCGTTTCAGCTGGCG | |
| | | CTGCTGCGCGACGCTGGTCTGCCGGTACCACGTAGCTTGTGGACAA | |
| | | ACGACCCTGAAGCAGTGCGGCGGTTTCATGCGGAAGTGGGTGACTG | |
| | | TATTTACAAACCGGTCGCCGGGGGAGCGCGTACACGCAAACTGGAA | |
| | | GCGAAAGATCTCGAAGCGGACCGCATCGAACGCCTGAGTGCAGCGC | |
| | | CGGTGTGTTTTCAAGAACTGCTCACAGGAGATGATGTGCGTGTTTA | |
| | | CGTGATAGATGACCAGGTAATATGCGCCCTGCGCATCGTAACTGAT | |
| | | GAGATCGATTTCCGCCAAGCAGAGGAACGTATCGAGGCCATCGAAA | |
| | | TTTCAGATGAAGTAAAAGACCAATGTGTACGTGCCGCCAAACTTGT | |
| | | TGGCCTGCGCTACACCGGTATGGATATCAAAGCCGGCGCCGATGGT | |
| | | AACTATCGTGTTCTCGAACTGAACGCGAGTGCGATGTTTCGCGGTT | |
| | | TCGAAGGCCGTGCGAATGTGGATATCTGTGGACCGCTGTGTGATGC | |
| | | ATTGATCGCTCAGACCAAACGT | |
| raxST | Codon | ATGGATTATCATTTCATCAGCGGACTGCCTCGTGCGGGGAGTTCAT | 514 |
| | optimized. ST | TACTGGCTGCGTTACTGCGTCAAAATCCGCAGCTGCATGCCGATGT | |
| | stands for | TACATCTCCGGTGGCGCGCCTTTACGCGGCCATGCTGATGGGTATG | |
| | SulfoTransferase | AGTGAAGAACACCCGAGCAACGTGCAGATTGACGATGCCCAACGTG | |
| | and denotes | TCCGTCTGTTACGTGCAGTATTTGATGCGTATTATCAGAACCGTCA | |
| | a single gene, | GGAACTGGGGACAGTGTTCGATACTAACCGCGCATGGTGCTCTCGC | |
| | not two genes. | CTCACGGGCCTGGCGCGTCTGTTTCCGCGTAGTCGCATGATCTGCT | |
| | | GTGTACGCGATGTGGGCTGGATTGTTGATTCTTTTGAACGCCTGGC | |
| | | GCAGTCGCAGCCGTTACGCCTTTCGGCCCTGTTCGGTTACGACCCC | |
| | | GAGGATTCGGTTAGCATGCACGCTGACTTACTCACTGCGCCTCGCG | |
| | | GGGTAGTGGGCTACGCCCTGGATGGTTTACGTCAAGCGTTTTATGG | |
| | | AGATCACGCGGATCGTCTGCTGTTGTTACGTTATGATACGCTGGCA | |
| | | CAGCGTCCTGCACAAGCCATGGAACAGGTATATGCATTCCTGCAGC | |
| | | TCCCTGCCTTTGCACATGATTATGCCGGTGTTCAGGCCGAAGCGGA | |
| | | ACGCTTTGATGCCGCCCTGCAAATGCCTGGTTTGCACCGCGTGCGT | |
| | | CGTGGTGTTCACTATGTTCCGCGACGTTCGGTTTTACCGCCTGCCC | |
| | | TGTTTGACCAGCTGCAGGAACTTGCATTCTGGGAAAGTGCACCCAG | |
| | | CCATGGAGCGCTGCTCGTG | |
| sgbL | Codon | ATGACAAGCCATGCAACCGAGGTTGAATGGGAGGACCTTCTGCGCC | 515 |
| | optimized | AAGCATTACACGCAACTGGTACAGGTGCTCGTTGGGCTGTAGAGGC | |
| | | GGACGAGATGTGGTGCCGTGTCGCCCCGGTGCCTGGAACTCGCCGC | |
| | | GAGCAAGGATGGAAGCTTCATGTAAGCGCGACGACCGCGAGTGCGC | |
| | | CCGAAGTCTTAACTCGTGCATTAGGCGTACTTCTGCGTGAAAAGTC | |
| | | CGGGTTCAAATTTGCCCGCTCACTTGAACAAGTCTCGGCCTTGAAT | |
| | | AGTCGTGCTACGCCCCGTGGTAGTTCGGGTAAATTTATCACAGTAT | |
| | | ACCCCCGCTCAGACGCCGAAGCCGTCGCACTGGCTCGCGACCTGCA | |
| | | TGCGGCAACGGCCGGCTTGGCTGGGCCCCGTATTCTTTCCGATCAA | |
| | | CCATACGCCGCGCACAGCCTGGTGCATTATCGTTATGGGGCTTTCG | |
| | | TGGGACGTCGTCGCCTTTCAGATGACGGGCTTTTAGTTTGGTTTAT | |
| | | TGAGGACCCAGATGGCAATCCCGTGGAGGATAAACGCACCGGACGT | |
| | | TATGCGCCGCCTCCCTGGGCTGTATGTCCGTTTCCTGCGAGCGTCC | |
| | | CCGTTGCGCCCCATGACGGCGAAGCTACGAGTCGTCCTGTTGTCTT | |
| | | AGGTGGTCGCTTCGCGGTTCGTGAAGCCATCCGTCAAACGAATAAA | |
| | | GGGGGCGTCTATCGCGGGTCGGACACACGCACTGGCACCGGCGTGG | |
| | | TTATCAAAGAGGCGCGCCCACATGTTGAAGGAGACGCCAGTGGGGG | |
| | | CGATGTTCGTGACTGGCTTCGCGCAGAGGCGCGTACGCTTGAAAAA | |
| | | TTAAAAGGTACCGGCTTGGCACCAGAAGCGGTGGCGTTGTTTGAGC | |
| | | ACGCTGGCCACTTGTTCTTAGCCCAAGACGAGGTCCCGGGGGTTAC | |
| | | GTTACGCACCTGGGTAGCGGAACACTTCCGTGACGTTGGAGGAGAG | |
| | | CGCTATCGTGCCGACGCCCTGGCTCAGGTGGCTCGTTTAGTTGATT | |
| | | TAGTCGCGGCTGCTCATGCACGTGGCTTGGTCCTGCGCGATTTTAC | |
| | | ACCAGGGAACGTGATGGTCCGTCCAGACGGCGAATTGCGCCTTATT | |
| | | GATTTAGAGCTGGCGGTTCTTGAGGATGAGGCCGCATTGCCTACCC | |
| | | ACGTCGGTACCCCGGGGTTTTCGGCACCCGAACGCCTTGCAGACGC | |
| | | TCCAGTGCGTCCTACTGCTGACTACTATTCTCTGGGAGCCACAGCT | |
| | | TGTTTTGTCTTGGCCGGTAAAGTCCCTAATTTACTTCCTGAAGAAC | |
| | | CCGTGGGTCGCCCATCGGAGGAGCGTCTTGCTGCCTGGTTGACTGC | |
| | | ATGTACACGTCCGCTGCGCCTGCCAGATGGAGTCGTTGACATGATC | |
| | | TTGGGGTTAATGCGCGATGATCCTGCAGAGCGCTGGGACCCATCCC | |
| | | GCGCGCGTGAAGCACTGCGCAAAGCTGACCCGACAGCACGCCCCGG | |
| | | GGATGCTGATCGCACTGCAGTACGTCGTACGGGTTCGTCGGCAGTG | |
| | | GCCGGGCCAGTTCCTGACTCACGTACAGCAGATGGTCGTACAGCGG | |
| | | ACGGCCGTTCCGCGGATGAAGTTGTGGCAGGTCTTGTCGATCACTT | |
| | | AGTCGATAGTATGACCCCGGCAGATGATCGTCTGTGGCCGGTAAGC | |
| | | ACTCTTACGGGAGAATCGGATCCATGTACAGTCCAGCAAGGCGCTG | |
| | | CTGGGGTGCTTGCGGTGTTGACCCGCTACTTCGAATTGACGGGCGA | |
| | | TCCGCGCTTACCAGGCTTATTGTCGACAGCCGGACGTTGGATCGCA | |
| | | GACCGCACGGATGTTCGTTCACCTCGTCCGGGATTACATTTCGGGG | |
| | | GACGCGGAACAGCCTGGGCCTTATACGACGCGGGGCGTGCAGTCGA | |
| | | CGATCGTCGCTTGGTGGAACATGCTCTGGACTTAGCATTAGCCCCG | |
| | | CCCCAAGCGACTCCTCATCACGATGTCACGCATGGGACTGCGGGCT | |
| | | CAGGCTTAGCCGCCTTGCACCTGTGGCAGCGTACTGGAGATACTCG | |
| | | TTTCGCGGATTTAGCAGTAGAGGCAGCTGATCGCTTAACAGCTGCA | |
| | | GCTCGTCGCGAGCCTTCGGGTGTTGGATGGGCAGTACCTGCAGAGG | |
| | | CCGACTCCCCAGAAGGAGGCAAGCGTTACCTGGGCTTCGCTCATGG | |
| | | CGCAGCTGGGATTGGGTGCTTCTTATTGGCTGCGGCGGAACTTAGT | |
| | | CGTCAACCCGATCATCGTGCAACTGCTTTGGAAGTTGGCGAAGGCC | |
| | | TGGTTGCTGATGCTGTTCGCATCGGAGAGGCGGCACAGTGGCCTGC | |
| | | GCAATCCGGGGACTTGCCGACAGCGCCTTACTGGTGCCATGGGGCG | |
| | | GCAGGTATCGGGACATTTCTTGTACGCTTATGGCAGGCGACCGGGG | |
| | | ACGATCGCTTCGGTGATCTGGCCCGCGGGAGTGCTCACGCTGTGGC | |
| | | CGAACGTGCTAGTCGCGCCCCATTGGCGCAATGTCACGGTTTGGCT | |
| | | GGAAACGGAGATTTCTTGTTGGATTTGGCAGACGCGACAGGCGATC | |
| | | CTGTGCATCGCGACACCGCGGAAGAGTTAGCAGGGTTGATCTTGGC | |
| | | CGAAGGAACCCGTCGTCAGGGACATGTCGTTTTCCCTAATGAGTAT | |
| | | GGGGAAGTATCATCTTCATGGTCCGACGGTAGTGCGGGGATTCTTG | |
| | | CGTTCCTTCTGCGTACGCGTCATACGGGCCCTCGCCATTGGATGGT | |
| | | AGAACAACGTGGG | |
| stspM | Codon | ATGGCGGATCATATTGCGGCCGGTCATGACACCGTCCTGAGCCTGG | 516 |
| | optimized | CCGAACGGACAGGTACCGATCCAGATCTGCTGGGCCGTGTGTTGCG | |
| | | CTTCCTCGCTTGTCGTGGTGTTTTCGCCGAGCCTCGCCCAGGTACT | |
| | | TATGCCTTGACCCCTCTGAGCTTAACTTTACTGGAAGGCCATCCGT | |
| | | CCGGTTTAAGAGAATGGTTGGATGCGTCGGGTGCGGGAGCGCGCAT | |
| | | GGACGCGGCAGTTGGAGATCTGCTTGGCGCCCTCCGCTCGGGTGAA | |
| | | CCGAGCTATCCACGTCTGCATGGTCGTCCGTTTTATGAAGATCTGG | |
| | | CGCTGCACAGCCGAGGCCCTGCTTTTGATGGACTGCGTCATACGCA | |
| | | CGCCGAATCGTATGTTGCCGACCTGCTGGCAGCCTACCCGTGGGAA | |
| | | CGCGTTCGTCGCGTGGTTGATGTAGGCGGTGGGACCGGCGTATTGG | |
| | | TCGAGGCGCTTATGAGAACTCATGCGACCCTCCGTACAGTACTGGT | |
| | | CGATCTTCCAGGCGCGGTGGCTACCGCTACCGCTCGAATTGCGGCT | |
| | | GCGGGTTTTGGCAATAGATATACACCGGTCACGGGTTCCTTCTTTG | |
| | | ATCCGCTGCCTGCGGGGGCGGATGTTTACACCCTGGTTAACGTGGT | |
| | | TCACAACTGGAACGATGAGCGTGCCTCAGCTCTGCTGCGTCGGTGT | |
| | | GCGGATGCGGGTCGCCGCGACAGTACGTTTGTTATCGTGGAACGCT | |
| | | TAGCGGACGATGCAGACCCTCGTGCCATCACCGCCATGGACCTCCG | |
| | | TATGTTCCTTTTTCTGGGCGGTAAAGAGCGCACGGCCGCACAGATT | |
| | | CGCGAAGTAGCTAGTGCGGCTGGCATGGCCCACCAAAGCACCATTA | |
| | | AAACACCGTCTGGCCTCCACTTACTTGTTTTCCGTAAGAAACGTTT | |
| | | CGCTGCTCGCGGTCACGGTCGTCGCATGGTGACC | |
| tgnB | Codon | ATGAAAACCATTCTGATTATTACCAATACCCTGGATCTGACCGTGG | 517 |
| | optimized | ATTATATTATTAATCGCTATAATCATACCGCTAAATTTTTTCGTCT | |
| | | GAATACCGATCGTTTTTTTGATTATGATATTAATATTACCAATAGC | |
| | | GGTACCAGCATTCGTAATCGTAAATCTAATCTGATTATTAATATTC | |
| | | AGGAAATTCATAGCCTGTATTATCGCAAAATTACCCTGCCGAATCT | |
| | | GGATGGCTATGAAAGTAAATATTGGACCCTGATGCAGCGCGAAATG | |
| | | ATGAGTATTGTTGAAGGCATTGCAGAAACCGCTGGCAATTTTGCAC | |
| | | TGACCCGTCCGTCTGTGCTGCGCAAAGCTGATAATAAAATTGTGCA | |
| | | GATGAAACTGGCAGAAGAAATTGGTTTTATTCTGCCGCAGAGTCTG | |
| | | ATTACCAATTCAAATCAGGCGGCAGCCTCATTTTGCAATAAAAATA | |
| | | ATACCAGCATTGTGAAACCGCTGAGTACCGGCCGCATTCTGGGTAA | |
| | | AAATAAAATTGGCATTATTCAGACCAATCTGGTTGAAACCCATGAA | |
| | | AATATTCAGGGCCTGGAACTGTCTCCGGCTTATTTTCAGGATTATA | |
| | | TTCCGAAAGATACCGAAATTCGTCTGACCATTGTTGGTAATAAACT | |
| | | GTTTGGCGCCAATATTAAATCAACCAATCAGGTTGATTGGCGCAAA | |
| | | AATGATGCACTGCTGGAATATAAACCGGCCAATATTCCGGATAAAA | |
| | | TTGCCAAAATGTGTCTGGAAATGATGGAAAAACTGGAAATTAATTT | |
| | | TGCGGCGTTTGATTTTATTATTCGTAATGGTGATTATATTTTTCTG | |
| | | GAACTGAATGCCAATGGTCAGTGGCTGTGGCTGGAAGATATTCTGA | |
| | | AATTTGATATTTCAAATACCATTATTAATTATCTGCTGGGTGAACC | |
| | | GATTTAA | |
| thcoK | Codon | ATGACGAGAACCAACACCGGCTATCGTTATCGCGCGTTCGGCCTGC | 518 |
| | optimized | GCATAGACTCAGATATTCCGCTGCCAGAATTAGGGGACGGTACGCG | |
| | | CCCTGATGGTGACGCGGATCTGACGGTCGTCCGGTGTGGGGAAGCG | |
| | | GAGCCGGAATGGGCTGAAGGTGGTGGCGGGGGTCGTCTGTATGCCG | |
| | | CTGAAGGCATTGTATCTTTTCGCGTGCCGCAGACGGCAGCGTTCCG | |
| | | TATTACTAATGGAAATCGCATCGAGGTGCATGCCTACTCGGGGGCT | |
| | | GATGAGGATCGAATACGCCTGTACGTGTTAGGGACCTGTATGGGAG | |
| | | CGCTGTTACTGCAACGTAGAATCTTACCGCTTCATGGTTCGGTCGT | |
| | | CGCCCGTGATGGTCGTGCGTATGCCATAGTTGGCGAAAGCGGAGCG | |
| | | GGCAAATCCACGATGAGTGCAGCACTTCTCGAACGTGGATTCCGCC | |
| | | TCGTTACGGATGACGTGGCCGCCATCGTGTTCGATGAGCGTGGGAC | |
| | | CCCACTGGTTATGCCGGCTTATCCACAGCAAAAACTGTGGCAGGAT | |
| | | TCCCTGGACCGTCTGCAAATTGCGGGCTCGGGCCTTCGTCCGCTGT | |
| | | TCGAACGCGAAACGAAATACGCTGTACCCGCGGATGGGGCATTCTG | |
| | | GCCCGAACCGGTTCCATTGGTGCACATTTACGAACTGGTTCATAGC | |
| | | GATGGTCAAACGCCTGAACTGCAGCCGATTGCCAAATTAGAGCGTT | |
| | | GCTATACCTTGTATCGCCACACATTTCGTAGAAGCCTGATCGTCCC | |
| | | CAGCGGCTTAAGCGCCTGGCATTTTGAAACGGCAGTGAAACTTGCG | |
| | | GAGAAAACGGGGATGTACCGTCTTATGCGCCCGGCCAAAGTTTTCG | |
| | | CGGCTCGCGAATCTGCTCGGCTGATTGAAACTCACGCCGATGGTGA | |
| | | AGTGTCACGT | |
| truD | Amplified | ATGCAACCAACCGCCCTCCAAATTAAGCCCCACTTCCACGTTGAGA | 519 |
| | from Topo-El | TAATTGAGCCGAAGCAAGTGTATCTCCTGGGCGAACAGGGCAACCA | |
| | | CGCTCTCACCGGGCAGCTCTACTGCCAAATTCTGCCTTTCTTAAAC | |
| | | GGCGAATACACCCGAGAACAAATTGTGGAAAAGCTCGATGGGCAGG | |
| | | TCCCGGAGGAATATATCGACTTCGTACTCAGTCGTCTGGTGGAGAA | |
| | | GGGCTATCTAACTGAGGTGGCTCCAGAACTATCCCTGGAAGTGGCA | |
| | | GCATTTTGGAGCGAATTGGGAATTGCCCCTTCTGTAGTGGCAGAAG | |
| | | GGCTAAAGCAGCCAGTGACAGTGACAACGGCGGGCAAGGGCATTAG | |
| | | GGAAGGGATAGTGGCTAACCTGGCAGCAGCGCTGGAGGAAGCTGGC | |
| | | ATTCAGGTGTCAGACCCAAGGGACCCAAAGGCCCCAAAGGCAGGGG | |
| | | ATTCTACTGCCCAGCTTCAGGTGGTGCTGACCGATGACTATTTACA | |
| | | GCCGGAACTTGCAGCGATCAACAAGGAAGCCTTAGAGCGCCAACAA | |
| | | CCCTGGTTGCTGGTTAAGCCTGTGGGCAGTATCCTCTGGTTGGGAC | |
| | | CGTTGTTCGTTCCTGGGGAAACCGGATGTTGGCACTGTCTTGCTCA | |
| | | ACGATTGCAAGGCAACCGGGAAGTTGAAGCATCGGTATTGCAACAA | |
| | | AAGCGAGCGCTGCAGGAGCGCAACGGTCAAAATAAAAATGGTGCAG | |
| | | TGAGTTGCTTGCCCACAGCACGGGCAACCCTACCTTCTACTCTACA | |
| | | AACAGGTTTACAGTGGGCTGCCACTGAGATTGCTAAGTGGATGGTC | |
| | | AAGCGGCACCTCAATGCCATAGCACCGGGAACGGCTCGTTTTCCCA | |
| | | CTCTAGCTGGCAAGATATTTACATTCAACCAGACGACTCTGGAGTT | |
| | | GAAAGCTCATCCTCTGAGCCGACGACCGCAATGTCCCACCTGTGGC | |
| | | GATCGGGAAACTCTCCAACGGCGCGGGTTTGAACCACTGAAGCTAG | |
| | | AGTCGCGCCCCAAACACTTCACCTCCGATGGCGGTCATCGCGCCAT | |
| | | GACCCCAGAACAAACGGTGCAGAAGTACCAACACCTCATCGGGCCC | |
| | | ATAACGGGGGTAGTGACGGAACTGGTGCGAATTTCTGACCCTGCCA | |
| | | ATCCCTTGGTGCATACCTACCGGGCTGGGCATAGCTTTGGCAGTGC | |
| | | TACGTCTCTGCGGGGGCTGCGCAATGTCCTACGCCACAAGAGTTCT | |
| | | GGTAAAGGCAAGACCGATAGCCAATCTCGGGCCAGCGGACTTTGCG | |
| | | AGGCGATCGAGCGCTATTCGGGCATTTTTCAGGGAGACGAACCCCG | |
| | | CAAGCGGGCAACTTTGGCTGAGTTGGGAGATTTGGCGATTCATCCA | |
| | | GAACAGTGTTTGCACTTTAGCGACAGGCAGTATGACAACCGGGAAA | |
| | | GCTCGAACGAGCGAGCAACAGTGACTCACGACTGGATTCCCCAACG | |
| | | GTTCGATGCAAGTAAGGCTCACGACTGGACTCCCGTGTGGTCCCTA | |
| | | ACGGAGCAAACCCATAAGTATCTGCCTACAGCCCTGTGCTATTACC | |
| | | GATACCCCTTCCCCCCAGAACACCGTTTCTGCCGTAGTGACTCCAA | |
| | | CGGAAACGCGGCGGGAAATACCCTGGAAGAGGCGATTTTGCAAGGA | |
| | | TTTATGGAACTGGTGGAACGGGATAGCGTGTGCCTGTGGTGGTACA | |
| | | ATCGCGTTAGCCGTCCGGCTGTGGATTTGAGTAGCTTTGACGAGCC | |
| | | TTATTTTTTGCAGTTGCAGCAGTTCTATCAAACTCAAAATCGCGAT | |
| | | CTGTGGGTACTGGATTTAACAGCAGATTTGGGCATTCCGGCTTTTG | |
| | | TAGGGGTATCGAATCGGAAAGCCGGCAGCTCGGAAAGAATAATTCT | |
| | | CGGCTTTGGAGCGCACCTGGACCCGACAGTTGCCATCCTTCGCGCT | |
| | | CTTACGGAGGTCAACCAAATAGGCTTGGAATTGGATAAAGTTTCTG | |
| | | ATGAGAGCCTCAAGAACGATGCCACGGATTGGTTAGTGAATGCTAC | |
| | | ATTGGCAGCTAGTCCCTATCTCGTTGCCGATGCTAGCCAACCCCTC | |
| | | AAGACTGCGAAGGATTATCCCCGGCGTTGGAGTGACGATATTTACA | |
| | | CCGATGTGATGACTTGTGTAGAAATAGCCAAGCAAGCAGGTCTAGA | |
| | | GACTTTGGTACTGGATCAGACCAGACCCGACATAGGTTTAAATGTG | |
| | | GTTAAAGTCATTGTGCCAGGAATGCGTTTTTGGTCGCGATTTGGCT | |
| | | CCGGTCGGCTCTATGACGTGCCAGTGAAGTTGGGATGGCGAGAGCA | |
| | | ACCACTTGCTGAGGCACAAATGAACCCTACACCGATGCCATTT | |

Precursor peptides

| | | | SEQ |
|---|---|---|---|
| Name | Details | Sequence | ID NO: |
| albsA | Codon | ATGGATTCACTGCTGTCAACAGAAACCGTCATTAGTGATGACGAAC | 520 |
| | optimized | TGCTTCCGATTGAAGTTGGTGGTACCGCGGAATTGACAGAGGGGCA | |
| | | GGGCGGCGGTCAGTCCGAGGATAAACGTCGCGCTTATAACTGC | |
| amdnA | Codon | ATGCCGGAAAATCGGCAGGAAGATCTCAACGCTCAGGCTGTACCAT | 521 |
| | optimized | TCTTCGCGCGTTTCTTGGAGGGTCAAAACTGCGAGGACCTTACTGA | |
| | | TGAGGAATCGGAGGCGGTTAGCGGTGGAAAACGCGGCCAAACCCGT | |
| | | AAATATCCAAGCGACTGCGAAGATGGGAATGGCGTGACCGGTAAAC | |
| | | TGCGCGATGAAGATATTGCAGTGACCTTGAAGTACCCATCCGACAA | |
| | | TGAAGATAATGGCGGCGGTGAAATTGTGACTCTGAAGTTTCCAAGT | |
| | | GATGATGATGATCAACCAGTAGGC | |
| atxA1 | Codon | CCGATCATTAGCGAAACGGTCCAGCCTAAAACGGCTGGCCTGATTG | 522 |
| | optimized | TTCTGGGCAAGGCAAGCGCGGAAACGCGCGGATTGAGCCAAGGCGT | |
| | | GGAACCGGACATTGGTCAGACGTACTTCGAAGAAAGCCGTATTAAT | |
| | | CAGGAT | |
| bamA | Codon | CTGAAAATCCGCAAGGTGAAAATTGTCAGAGCGCAGAACGGCCACT | 523 |
| | optimized | ACACGAAC | |
| bmbC | Codon | ATGGGTCCGGTTGTTGTGTTCGATTGCATGACGGCCGACTTTCTGA | 524 |
| | optimized | ACGACGATCCAAATAACGCGGAGTTGTCTGCCTTGGAAATGGAGGA | |
| | | GCTCGAGTCCTGGGGCGCCTGGGACGGAGAGGCTACCAGC | |
| bsjA2 | Codon | ATGACCAATGAAGAGATCATTGTCGCGTGGAAAAACCCTAAAGTCC | 525 |
| | optimized | GTGGCAAAAATATGCCAAGTCACCCGAGCGGCGTGGGATTCCAAGA | |
| | | GCTTTCCATCAACGAGATGGCCCAAGTGACCGGCGGAGCAGTAGAA | |
| | | CAGCGTGCAACACCAACCCTGGCAACCCCGCTGACCCCGCATACCC | |
| | | CGTACGCAACCTATGTGGTTAGCGGAGGCGTGGTTAGCGCGATTTC | |
| | | TGGTATCTTCAGCAACAATAAAACGTGTCTGGGC | |
| bsjA3 | Codon | ATGACCAATGAGGAAATTATCGTTGCGTGGAAAAACCCGAAGGTGC | 526 |
| | optimized | GCGGCAAAAACATGCCTTCCCATCCGTCCGGTGTGGGCTTCCAGGA | |
| | | ATTATCTATTAATGAAATGGCACAGGTGACTGGTGGCGCGGTTGAA | |
| | | CAGCGCGCGACGCCGGCAACCCCAGCAACACCATGGCTGATTAAAG | |
| | | CGTCTTATGTGGTGAGTGGGGCGGGAGTTTCTTTTGTCGCAAGCTA | |
| | | TATCACTGTAAAC | |
| capA | Codon | ATGGTGCGTTTCCTGGCTAAGCTGCTGCGTTCAACGATCCATGGCT | 527 |
| | optimized | CTAATGGCGTGAGCCTCGACGCCGTCAGTTCCACGCATGGTACTCC | |
| | | GGGGTTTCAGACACCTGATGCACGTGTTATTTCACGCTTTGGCTTT | |
| | | AAT | |
| cinA | Codon | ATGACGGCGAGTATTCTTCAGTCTGTCGTTGATGCGGACTTTCGTG | 528 |
| | optimized | CGGCCCTGATTGAAAACCCAGCCGCATTCGGCGCGAGCACCGCAGT | |
| | | TTTGCCGACCCCAGTCGAACAGCAGGATCAGGCATCACTGGATTTT | |
| | | TGGACAAAAGATATTGCTGCCACTGAGGCGTTTGCTTGCAAACAGT | |
| | | CTTGCTCATTTGGGCCGTTCACCTTTGTGTGCGACGGGAATACCAA | |
| | | A | |
| cln1A1 | Codon | ACTCCCATTCAATCCAAATTCTGCCTCCTGCGCGTGGGCAGTGCCA | 529 |
| | optimized | AACGGCTGACGCAGTCATTCGACGTGGGAACTATTAAGGAAGGTTT | |
| | | AGTCAGCCAGTATTATTTTGCG | |
| cln1A2 | Codon | ACCCAGGTGAGCCCATCACCGCTGCGCCTGATTCGCGTCGGGAGAG | 530 |
| | optimized | CCTTGGACCTGACCCGCTCTATCGGGGATAGTGGGCTGCGTGAGTC | |
| | | CATGTCAAGCCAGACGTACTGGCCC | |
| cln2A1 | Codon | AACACTTTAAAAACGCGTCTTATTCGCTTTGGGTCGGCTAAACGTC | 531 |
| | optimized | TGACGCGCGCAGGTACGGGCGTGCTGTTACCTGAAACCAACCAGAT | |
| | | TAAGCGCTACGATCCAGCA | |
| cln2A2 | Codon | ACCACACCCAAATTTCGACTGATTCGGTTAGGTTCAGCTAAGCGAT | 532 |
| | optimized | TGACCCGGTCGGGAATCGGGGATGTGTTTCCGGAGCCAAACATGGT | |
| | | TCGCCGCTGGGAT | |
| cln3A1 | Codon | CAGCGTATAATAGATGAAACCACCGATGGTCTGATTGAACTGGGGG | 533 |
| | optimized | CGGCCAGCGTACAGACACAGGGCGATGTTTTGTTTGCTCCGGAGCC | |
| | | TGGCGTGGGCCGACCTCCAATGGGCCTTTCCGAAGAT | |
| cln3A2 | Codon | GAACGCATTGAAGATCATATTGATGATGAACTGATTGACCTGGGAG | 534 |
| | optimized | CTGCTTCGGTTGAAACCCAGGGAGATGTGCTGAATGCACCGGAGCC | |
| | | TGGTATCGGTCGTGAACCGACAGGCTTGAGCCGCGAT | |
| cln3A3 | Codon | GAATTTGAAGGTATCCCATCACCGGATGCGCGTATTGATTTGGGTC | 535 |
| | optimized | TGGCGTCGGAAGAAACCTGTGGTCAGATTTATGATCACCCGGAAGT | |
| | | AGGCATCGGTGCGTACGGGTGCGAGGGCCTGCAGCGT | |
| comX | Codon | CAAGATCTGATTAATTACTTCCTGAATTATCCTGAGGCTCTGAAGA | 536 |
| | optimized | AACTCAAGAATAAGGAAGCCTGCTTAATTGGGTTTGACGTCCAGGA | |
| | | AACCGAAACGATTATCAAAGCCTATAACGATTACTACCGCGCTGAT | |
| | | CCGATCACGCGTCAATGGGGTGAT | |
| crnA1 | Codon | ATGTCCGAACTGAGTATGGAGAAAGTGGTCGGCGAAACATTTGAGG | 537 |
| | optimized | ATCTGAGCATCGCGGAAATGACGATGGTGCAGGGCAGCGGCGACAT | |
| | | TAACGGCGAATTTACTACCTCGCCGGCATGTGTTTATTCCGTTATG | |
| | | GTTGTATCGAAAGCAAGCAGCGCTAAATGTGCGGCCGGTGCATCGG | |
| | | CAGTCTCGGGAGCCATTCTGAGTGCGATTCGTTGC | |
| crnA2 | Codon | ATGAGCGAATCCAACATGAAGAAGGTTGTTGGCGAAACCTTCGAAG | 538 |
| | optimized | ATCTGAGCATCGCAGAAATGACGAAAGTTCAGGGCTCAGGGGACGT | |
| | | GATGCCGGAATCTACCCCAATTTGTGCCGGCTTCGCAACCTTGATG | |
| | | AGTTCTATCGGTCTTGTTAAAACCATCAAAGGCAATGTCAAAAGTT | |
| | | TCTCCGTCTTAATT | |
| csegA1 | Codon | ACCAAGAAAAACGCAACACAGGCCCCACGTTTAGTACGTGTAGGCG | 539 |
| | optimized | ATGCTCATCGTTTGACCCAAGGTGCTTTCGTTGGACAGCCGGAAGC | |
| | | CGTAAATCCACTTGGACGTGAAATTCAAGGA | |
| csegA2 | Codon | ACCAAAACACACAGACTGATCAGATTGGGCGACGCGCAACGCTTGA | 540 |
| | optimized | CCCAGGGCACATTGACTCCGGGCTTACCGGAGGACTTTCTGCCGGG | |
| | | CCATTACATGCCGGGG | |
| csegA3 | Codon | ACTTCACGTTTCCAACTCCTGCGCCTGGGAAAAGCCGATCGTTTGA | 541 |
| | optimized | CGCGTGGCGCGCTGGTCGGGCTCCTGATCGAAGATATTACTGTCGC | |
| | | TCGCTACGACCCTATG | |
| epiA | Codon | GAAGCAGTTAAAGAGAAGAACGATCTGTTCAACCTGGATGTTAAAG | 542 |
| | optimized | TCAACGCAAAAGAAAGTAACGATAGTGGCGCAGAACCACGCATAGC | |
| | | GTCGAAATTTATTTGCACACCAGGCTGCGCGAAAACGGGTTCGTTT | |
| | | AACAGCTATTGTTGT | |
| halA1 | Codon | ACGAACTTGCTGAAAGAATGGAAAATGCCCCTGGAACGTACGCATA | 543 |
| | optimized | ATAACTCCAACCCGGCGGGAGACATTTTTCAGGAACTGGAAGATCA | |
| | | AGACATACTCGCCGGTGTGAATGGAGCAGAAAACTTATACTTTCAG | |
| | | GGTTGTGCGTGGTATAACATTAGCTGCCGTCTGGGCAACAAAGGAG | |
| | | CCTACTGCACCCTTACAGTTGAGTGCATGCCCTCCTGTAAC | |
| halA2 | Codon | GTGAATTCCAAAGACCTGAGAAATCCAGAATTTCGCAAAGCTCAGG | 544 |
| | optimized | GTCTGCAGTTTGTAGATGAAGTTAATGAGAAGGAACTCTCGAGTTT | |
| | | AGCCGGCAGCGAGAATCTTTACTTTCAAGGCACGACGTGGCCATGT | |
| | | GCGACCGTCGGCGTTTCAGTTGCCTTGTGCCCGACGACCAAATGCA | |
| | | CTTCACAGTGC | |
| kgpE | Codon | AAGAACCCGACGCTGTTGCCCAAACTGACCGCGCCGGTCGAACGTC | 545 |
| | optimized | CGGCCGTAACTTCGTCGGATTTAAAGCAAGCCTCAAGCGTCGATGC | |
| | | TGCATGGTTAAATGGCGATAATAACTGGTCAACCCCATTCGCCGGT | |
| | | GTGAACGCGGCATGGTTAAATGGGGACAACAACTGGTCCACGCCTT | |
| | | TTGCGGGCGTGAATGCTGCATGGCTTAATGGCGACAATAACTGGAG | |
| | | CACTCCATTTGCCGCCGATGGCGCTGAG | |
| lasA | Codon | ATGGACAAACGTGTGCGTTACGAAAAACCGAGCCTGGTGAAAGAGG | 546 |
| | optimized | GTACGTTTCGCAAAACTACCGCTGGCCTGCGGCGTCTGTTCGCTGA | |
| | | CCAGCTGGTTGGCCGCCGTAACATT | |
| lcnA | Codon | ACTAAAGGCCTGGACAAAATGCTTTTAACCAAAAAGAAGAAGGATA | 547 |
| | optimized | GTATGGGTCTGCTGAACGAAATCGACGTTACCACCCTGGATGAACA | |
| | | GTTAGGCGGTAAAATGAGCAAAGCATGGTGCCGATCCATGGTGGTG | |
| | | TCCTGCGTGTATAACCTGGTTGATTTTTCGTCGTCGAGTGACGGGA | |
| | | AAAAGACATGTGCTCTGTACCGCAAATATTGT | |
| ltnA1 | Codon | ATGAATAAAAACGAAATCGAAACCCAGCCAGTTACGTGGCTGGAGG | 548 |
| | optimized | AAGTTTCTGATCAGAATTTTGATGAGGATGTCTTTGGTGCGTGTAG | |
| | | CACAAACACCTTCTCGCTGAGCGATTACTGGGGTAACAACGGTGCT | |
| | | TGGTGTACACTCACGCACGAATGTATGGCATGGTGCAAG | |
| ltnA2 | Codon | ATGAAGGAAAAGAATATGAAGAAAAACGACACCATCGAACTTCAGC | 549 |
| | optimized | TTGGAAAATACCTGGAAGATGATATGATCGAACTGGCTGAAGGGGA | |
| | | TGAGTCCCATGGGGGTACTACCCCGGCTACCCCTGCGATTTCTATC | |
| | | CTCAGCGCGTATATCAGCACCAATACCTGCCCGACAACTAAGTGTA | |
| | | CACGCGCGTGC | |
| mcbA | Synthesized, | ATGGAATTAAAAGCGAGTGAATTTGGTGTAGTTTTGTCCGTTGATG | 550 |
| | sequence from | CTCTTAAATTATCACGCCAGTCTCCATTAGGTGTTGGCATTGGTGG | |
| | genome | TGGTGGCGGCGGCGGCGGCGGCGGCGGTAGCTGCGGTGGTCAAGGT | |
| | | GGCGGTTGTGGTGGTTGCAGCAACGGTTGTAGTGGTGGAAACGGTG | |
| | | GCAGCGGCGGAAGTGGTTCACATATC | |
| mdnA | Amplified | ATGGCATATCCCAACGATCAACAAGGTAAAGCACTTCCTTTCTTTG | 551 |
| | from | CTCGTTTCTTGTCCGTAAGCAAAGAGGAATCTTCCATCAAGTCTCC | |
| | pARW071 | TTCCCCTGAGCCTACCTACGGGGGCACCTTTAAATACCCTTCTGAC | |
| | | TGGGAAGATTAT | |
| mdnA* | Amplified | ATGGCACTTCCTTTCTTTGCTCGTTTCTTGTCCGTAAGCAAAGAGG | 552 |
| | from mdnA | AATCTTCCATCAAGTCTCCTTCCCCTGAGCCTACCTACGGGGGCAC | |
| | | CTTTAAATACCCTTCTGACTGGGAAGATTAT | |
| mibA | Codon | ATGCCAGCCGATATTCTGGAGACTCGTACCAGCGAAACGGAGGACT | 553 |
| | optimized | TACTGGATCTTGACCTGAGCATCGGTGTAGAAGAAATCACCGCAGG | |
| | | CCCGGCAGTGACTTCTTGGTCACTGTGCACCCCTGGATGCACGAGT | |
| | | CCGGGCGGTGGCTCCAATTGTTCGTTCTGTTGC | |
| paaP | Codon | ATGATTAAATTTTCTACATTGTCTCAGCGCATCAGCGCCATCACGG | 554 |
| | optimized | AAGAAAACGCCATGTACACTAAGGGTCAAGTGATCGTATTGAGC | |
| padeA | Codon | AAAAAGCAATATAGCAAACCTAGCCTGGAGGTTCTGGACGTCCACC | 555 |
| | optimized | AGACCATGGCTGGCCCGGGCACTAGTACGCCAGACGCGTTTCAGCC | |
| | | AGATCCAGATGAAGATGTTCACTATGATTCG | |
| palA | Codon | AAAGATCTTCTGAAGGAACTGATGTATGAAGTAGACCTCGAAGAGA | 556 |
| | optimized | TGGAGAATCTTCAGGGTAGCGGGTACTCAGCCGCCCAGTGTGCCTG | |
| | | GATGGCGCTGAGCTGCGTCAATTACATCCCGGGAGTGGGATTCGGT | |
| | | TGTGGCGGCTACAGCGCATGTGAACTCTACAAGCGTTATTGT | |
| papA | Codon | ATGTTGAAACAGATCAATGTGATTGCTGGCGTAAAAGAGCCTATTC | 557 |
| | optimized | GCGCCTATGGTTGTTCGGCTAATGACGCATGCTATTTTTGCGACAC | |
| | | GCGTGACAACTGCAAAGCCTGTGATGCCAGTGATTTTTGTATCAAA | |
| | | AGTGATACG | |
| papA_tev | Codon | TTGAAACAGATCAATGTGATTGCTGGCGTAAAAGAGCCTATTCGCG | 558 |
| | optimized | CCTATGAGAACTTGTATTTCCAGGGTTGTTCGGCTAATGACGCATG | |
| | | CTATTTTTGCGACACGCGTGACAACTGCAAAGCCTGTGATGCCAGT | |
| | | GATTTTTGTATCAAAAGTGATACG | |
| papoA | Codon | AGCAAGAAAGAATGGCAAGAGCCCACGATCGAAGTGCTCGATATTA | 559 |
| | optimized | ATCAGACTATGGCGGGTAAGGGCTGGAAACAGATAGACTGGGTGAG | |
| | | CGACCATGATGCTGACTTACACAATCCGTCT | |
| pbtA | Codon | ATGAACCTGAACGATTTACCTATGGACGTCTTTGAAATGGCAGACA | 560 |
| | optimized | GCGGTATGGAGGTGGAAAGCCTCACGGCTGGCCATGGCATGCCAGA | |
| | | AGTTGGAGCTAGTTGCAACTGTGTGTGCGGGTTTTGCTGCAGCTGC | |
| | | AGTCCGAGCGCG | |
| pcpA | Codon | ATGTCGAGTAATATCCTCGAAAAAGTTAAGGAGTTTTTCGTCCGGC | 561 |
| | optimized | TGGTGAAGGATGATGCGTTTCAAAGCCAGCTGCAGAACAACAGTAT | |
| | | TGATGAAGTTCGAAATATCCTGCAGGAGGCCGGGTACATATTCAGC | |
| | | AAAGAAGAATTCGAAACCGCAACCATTGAATTGCTGGATTTGAAGG | |
| | | AACGCGATGAATTCCACGAGCTGACAGAAGAGGAGCTTGTCACCGC | |
| | | TGTTGGCGGTGTTACGGGCGGGAGTGGTATATATGGCCCGATTCAA | |
| | | GCTATGTACGGTGCCGTCGTAGGTGATCCAAAACCGGGTAAGGACT | |
| | | GGGGGTGGCGCTTTCCGAGCCCGCTGCCAAAACCGAGTCCGATTCC | |
| | | GAGTCCGTGGAAACCCCCGGTTGATGTCCAGCCTATGTATGGTGTG | |
| | | GTAGTGTCAAACGATAGT | |
| pgm2 | Codon | ATGGAGCGCGAAATCGTGTGGACAGAAATTGAGGAGTCGGATTTAG | 562 |
| | optimized | CCGCCGTCGTGTCGGCATCTAATGTCAAGGATGGTCCAACCGTTAG | |
| | | CTCAAGTAATGTAAAGGACCGC | |
| plpA1 | Codon | ATGAGCATTGAGAATGCCAAGAGCTTTTATGAACGCGTCAGTACAG | 563 |
| | optimized | ATAAGCAGTTCCGCACTCAACTGGAAAATACGGCCAGTGCTGAAGA | |
| | | ACGGCAGAAAATCATTCAGGCAGCGGGCTTTGAGTTCACCAATCAG | |
| | | GAGTGGGAAATTGCAAAAGAACAGATTCTTGCGACAAGTGAAAGTA | |
| | | ATAACGGTGAACTGTCCGAGGCCGAACTGACCGCCGTCAGCGGTGG | |
| | | GGTTGACTTAAGCATTTTCGAGCTGCTGGACGAAGAACCTTTATTC | |
| | | CCGATTCGTCCTTTGTACGGCCTGCCTATT | |
| plpA2 | Codon | ATGTCTATTGAGAGTGCAAAGGCTTTCTACCAGCGTATGACGGATG | 564 |
| | optimized | ACGCATCTTTTCGTACCCCTTTTGAAGCGGAACTGTCGAAAGAGGA | |
| | | GCGCCAACAATTAATCAAAGATAGCGGATATGACTTTACTGCAGAA | |
| | | GAATGGCAACAGGCTATGACCGAGATCCAGGCGGCACGCTCAAACG | |
| | | AGGAACTGAATGAGGAAGAACTCGAGGCAATTGCCGGGGGCGCTGT | |
| | | GGCCGCAATGTATGGTGTGGTTTTCCCATGGGACAACGAGTTCCCG | |
| | | TGGCCCCGCTGGGGCGGT | |
| pqqA | Amplified | ATGTGGAAGAAACCTGCTTTTATCGATTTACGTCTCGGTCTGGAAG | 565 |
| | from genome | TGACGCTGTACATTTCTAACCGT | |
| procA* | Codon | ATGTCAGAAGAACAACTCAAGGCATTCATTGCCAAGGTTCAAGCAG | 566 |
| | optimized | ACACTTCACTGCAGGAACAGCTCAAAGTAGAAGGTGCTGATGTTGT | |
| | | TGCTATTGCTAAAGCCTCAGGGTTCGCGATTACCACAGAGGACCTC | |
| | | AATTCGCATCGCCAAAATCTGTCTGATGATGAGCTGGAGGGAGTCG | |
| | | CGGGAGGCTTTTTCTGCGTACAGGGTACGGCCAACCGTTTCACTAT | |
| | | CAACGTTTGC | |
| procA1.7 | Codon | ATGTCAGAAGAACAACTCAAGGCATTCATTGCCAAGGTTCAAGCAG | 567 |
| | optimized | ACACTTCACTGCAGGAACAGCTCAAAGTAGAAGGTGCTGATGTTGT | |
| | | TGCTATTGCTAAAGCCTCAGGGTTCGCGATTACCACAGAGGACTTA | |
| | | AAAGCACATCAAGCCAACTCACAAAAGAACCTGTCTGATGCTGAGC | |
| | | TGGAAGGTGTGGCTGGGCGAACCATTGGGGGAACCATTGTGTCGAT | |
| | | AACCTGTGAGACTTGCGATCTGCTTGTGGGGAAAATGTGC | |
| psnA2 | Codon | ATGAGCAAAAATGAGAACAACAAGAAACAGCTGCGCGATCTTTTCA | 568 |
| | optimized | TTGAAGATCTGGGCAAAGTTACTGGCGGTAAAGGTGGCCCGTATAC | |
| | | CACCTTAGCCATTGGCGAAGAAGATCCGATTACCACTTTGGCTATC | |
| | | GGAGAAGAGGACCCTGATCCAACGACACTTGCCTTAGGTGAAGAGG | |
| | | ACCCAACTACGCTTGCAATCGGCGAAGAA | |
| psnA2_tev | Codon | ATGAGCAAAAATGAGAACAACAAGAAACAGCTGCGCGATCTTTTCA | 569 |
| | optimized | TTGAAGATCTGGGCAAAGTTACTGGCGAGAACTTGTATTTCCAGGG | |
| | | TAAAGGTGGCCCGTATACCACCTTAGCCATTGGCGAAGAAGATCCG | |
| | | ATTACCACTTTGGCTATCGGAGAAGAGGACCCTGATCCAACGACAC | |
| | | TTGCCTTAGGTGAAGAGGACCCAACTACGCTTGCAATCGGCGAAGA | |
| | | A | |
| raxX | Codon | AACCACTCTAAGAAAAGTCCGGCAAAAGGGGCAGCGTCCCTGCAGC | 570 |
| | optimized | GTCCTGCTGGGGCAAAAGGCCGCCCTGAACCTCTGGATCAACGCTT | |
| | | GTGGAAACACGTCGGTGGTGGTGACTACCCACCCCCAGGAGCCAAC | |
| | | CCAAAGCATGATCCACCACCCCGCAATCCGGGCCACCAT | |
| sboA | Amplified | ATGAAAAAAGCTGTCATTGTAGAAAACAAAGGTTGTGCAACATGCT | 571 |
| | from genome | CGATCGGAGCCGCTTGTCTAGTGGACGGTCCTATCCCTGATTTTGA | |
| | | AATTGCCGGTGCAACAGGTCTATTCGGTCTATGGGGA | |
| sgbA | Codon | TCTGGTCGCGGGCGCGATCCTGATGCTGCTGTACCTCCCTTGCCTC | 572 |
| | optimized | GTGTACCTCGCACTACTAATCATGAGCCACGTACGGCGTCCCGAGA | |
| | | ACCAAGAGCAGCTCCAAGAACTGGACCTACACGTCCGCCTTCGTCG | |
| | | CGTCCATCTCCGTGTGGTCACTCTCCTCAAACCCCTGGTGCAGGAC | |
| | | GCAGTGGATGTCGTGTGGAGCGTCAAAAATCGGCTGCGGCTTCGTC | |
| | | TGAGAAGGAAAAGACAATGGAGAACCAAGATTTGGAGTTATTAGCA | |
| | | CGCCTGCATGCACTTCCTGAGACTGAACCGGTGGGCGTCGACGGAT | |
| | | TACCCTATGGCGAGACTTGTGAGTGCGTCGGGTTACTTACGTTGTT | |
| | | GAACACCGTATGTATCGGCATTTCATGCGCT | |
| strA | Codon | ATGAGTAAGGAATTAGAAAAAGTTCTTGAATCCAGTTCAATGGCAA | 573 |
| | optimized | AGGGGGACGGCTGGAAGGTTATGGCTAAAGGTGACGGTTGGGAG | |
| stspA | Codon | AAGAAATTCTATGAAGCGCCAGCTCTCATCGAACGTGGCGCCTTTG | 574 |
| | optimized | CGGCTGCTACAGCGGGGTTTGGACGTCTGCTGGCGGATCAGCTGGT | |
| | | GGGACGCCTGATTCCG | |
| tbtA | Codon | ATGGACCTGAATGATCTGCCGATGGATGTTTTTGAACTGGCAGATA | 575 |
| | optimized | GCGGTGTTGCAGTTGAAAGCCTGACCGCAGGTCATGGTATGACCGA | |
| | | AGTTGGTGCAAGCTGTAATTGCTTTTGTTATATTTGTTGTAGCTGC | |
| | | AGCAGCGCC | |
| tfxA | Amplified | ATGGATAACAAGGTTGCGAAGAATGTCGAAGTGAAGAAGGGCTCCA | 576 |
| | from genome | TCAAGGCGACCTTCAAGGCTGCTGTTCTGAAGTCGAAGACGAAGGT | |
| | | CGACATCGGAGGTAGCCGTCAGGGCTGCGTCGCT | |
| tgnA* | Codon | TATCGACCTTATATTGCCAAGTATGTCGAAGAACAAACTCTGCAGA | 577 |
| | optimized | ATTCAACCAACCTGGTATATGACGACATCACGCAGATCTCTTTTAT | |
| | | CAATAAAGAAAAGAACGTGAAAAAAATTAATCTGGGTCCCGATACT | |
| | | ACGATCGTGACTGAAACCATCGAGAATGCGGACCCCGATGAGTATT | |
| | | TCTTA | |
| thcoA | Codon | CGCAAGAAAGAATGGCAGACACCAGAACTGGAAGTACTCGATGTAC | 578 |
| | optimized | GCCTCACCGCAGCGGGCCCGGGTAAAGCTAAACCGGATGCTGTGCA | |
| | | GCCAGACGAAGATGAAATAGTGCACTACTCA | |
| truE* | Codon | ATGAACAAGAAGAACATTTTACCGCAGTTAGGACAACCAGTCATCC | 579 |
| | optimized | GCCTTACTGCCGGTCAACTGTCAAGCCAACTGGCGGAGCTTTCTGA | |
| | | GGAGGCTCTGGGAGGGGTCGATGCCTCGTACGCGGTGTTCTGGCCG | |
| | | ATCTGTAGCTATGACGAC | |
| truE | Codon | ATGAACAAGAAGAACATTTTACCGCAGTTAGGACAACCAGTCATCC | 580 |
| | optimized | GCCTTACTGCCGGTCAACTGTCAAGCCAACTGGCGGAGCTTTCTGA | |
| | | GGAGGCTCTGGGAGTCGATGCCTCGACCTTGCCGGTTCCGACGTTG | |
| | | TGTAGCTATGACGGGGTGGACGCTAGCACAGTCCCTACACTTTGTA | |
| | | GTTACGATGAC | |
| truE_TEV | Codon | AACAAGAAGAACATTTTACCGCAGTTAGGACAACCAGTCATCCGCC | 581 |
| | optimized | TTACTGCCGGTCAACTGTCAAGCCAACTGGCGGAGCTTTCTGAGGA | |
| | | GGCTCTGGGAGAGAACTTGTATTTCCAGGGTGTCGATGCCTCGACC | |
| | | TTGCCGGTTCCGACGTTGTGTAGCTATGACGGGGTGGACGCTAGCA | |
| | | CAGTCCCTACACTTTGTAGTTACGATGAC | |

Plasmid origins

| | | | SEQ |
|---|---|---|---|
| Name | Details | Sequence | ID NO: |
| pSC101 | var2 - | AGTAAGACGGGTAAGCCTGTTGATGATACCGCTGCCTTACTGGGTG | 582 |
| | maintains at | CATTAGCCAGTCTGAATGACCTGTCACGGGATAATCCGAAGTGGTC | |
| | p15A-level | AGACTGGAAAATCAGAGGGCAGGAACTGCTGAACAGCAAAAAGTCA | |
| | copy number | GATAGCACCACATAGCAGACCCGCCATAAAACGCCCTGAGAAGCCC | |
| | | GTGACGGGCTTTTCTTGTATTATGGGTAGTTTCCTTGCATGAATCC | |
| | | ATAAAAGGCGCCTGTAGTGCCATTTACCCCCATTCACTGCCAGAGC | |
| | | CGTGAGCGCAGCGAACTGAATGTCACGAAAAAGACAGCGACTCAGG | |
| | | TGCCTGATGGTCGGAGACAAAAGGAATATTCAGCGATTTGCCCGAG | |
| | | CTTGCGAGGGTGCTACTTAAGCCTTTAGGGTTTTAAGGTCTGTTTT | |
| | | GTAGAGGAGCAAACAGCGTTTGCGACATCCTTTTGTAATACTGCGG | |
| | | AACTGACTAAAGTAGTGAGTTATACACAGGGCTGGGATCTATTCTT | |
| | | TTTATCTTTTTTTATTCTTTCTTTATTCTATAAATTATAACCACTT | |
| | | GAATATAAACAAAAAAAACACACAAAGGTCTAGCGGAATTTACAGA | |
| | | GGGTCTAGCAGAATTTACAAGTTTTCCAGCAAAGGTCTAGCAGAAT | |
| | | TTACAGATACCCACAACTCAAAGGAAAAGGACTAGTAATTATCATT | |
| | | GACTAGCCCATCTCAATTGGTATAGTGATTAAAATCACCTAGACCA | |
| | | ATTGAGATGTATGTCTGAATTAGTTGTTTTCAAAGCAAATGAACTA | |
| | | GCGATTAGTCGCTATGACTTAACGGAGCATGAAACCAAGCTAATTT | |
| | | TATGCTGTGTGGCACTACTCAACCCCACGATTGAAAACCCTACAAG | |
| | | GAAAGAACGGACGGTATCGTTCACTTATAACCAATACGCTCAGATG | |
| | | ATGAACATCAGTAGGGAAAATGCTTATGGTGTATTAGCTAAAGCAA | |
| | | CCAGAGAGCTGATGACGAGAACTGTGGAAATCAGGAATCCTTTGGT | |
| | | TAAAGGCTTTTGGATTTTCCAGTGGACAAACTATGCCAAGTTCTCA | |
| | | AGCGAAAAATTAGAATTAGTTTTTAGTGAAGAGATATTGCCTTATC | |
| | | TTTTCCAGTTAAAAAAATTCATAAAATATAATCTGGAACATGTTAA | |
| | | GTCTTTTGAAAACAAATACTCTATGAGGATTTATGAGTGGTTATTA | |
| | | AAAGAACTAACACAAAAGAAAACTCACAAGGCAAATATAGAGATTA | |
| | | GCCTTGATGAATTTAAGTTCATGTTAATGCTTGAAAATAACTACCA | |
| | | TGAGTTTAAAAGGCTTAACCAATGGGTTTTGAAACCAATAAGTAAA | |
| | | GATTTAAACACTTACAGCAATATGAAATTGGTGGTTGATAAGCGAG | |
| | | GCCGCCCGACTGATACGTTGATTTTCCAAGTTGAACTAGATAGACA | |
| | | AATGGATCTCGTAACCGAACTTGAGAACAACCAGATAAAAATGAAT | |
| | | GGTGACAAAATACCAACAACCATTACATCAGATTCCTACCTACATA | |
| | | ACGGACTAAGAAAAACACTACACGATGCTTTAACTGCAAAAATTCA | |
| | | GCTCACCAGTTTTGAGGCAAAATTTTTGAGTGACATGCAAAGTAAG | |
| | | TATGATCTCAATGGTTCGTTCTCATGGCTCACGCAAAAACAACGAA | |
| | | CCACACTAGAGAACATACTGGCTAAATACGGAAGGATCTGAGGTTC | |
| | | TTATGGCTCTTGTATCTATCAGTGAAGCATCAAGACTAACAAACAA | |
| | | AAGTAGAACAACTGTTCACCGTTACATATCAAAGGGAAAACTGTCC | |
| | | ATATGCACAGATGAAAACGGTGTAAAAAAGATAGATACATCAGAGC | |
| | | TTTTACGAGTTTTTGGTGCATTCAAAGCTGTTCACCATGAACAGAT | |
| | | CGACAATGTAACAGATGAACAGCATGTAACACCTAATAGAACAGGT | |
| | | GAAACCAGTAAAACAAAGCAACTAGAACATGAAATTGAACACCTGA | |
| | | GACAACTTGTTACAGCTCAACAGTCACACATAGACAGCCTGAAACA | |
| | | GGCGATGCTGCTTATCGAATCAAAGCTGCCGACAACACGGGAGCCA | |
| | | GTGACGCCTCCCGTGGGGAAAAAATCATGGCAATTCTGGAAGAAAT | |
| | | AGCGCTTTCAGCCGGCAAACCGGCTGAAGCCGGATCTGCGATTCTG | |
| | | ATAACAAACTAGCAACACCAGAACAGCCCGTTTGCGGGCAGCAAAA | |
| | | CCCGTAC | |
| p15A | | TTAATAAGATGATCTTCTTGAGATCGTTTTGGTCTGCGCGTAATCT | 583 |
| | | CTTGCTCTGAAAACGAAAAAACCGCCTTGCAGGGCGGTTTTTCGAA | |
| | | GGTTCTCTGAGCTACCAACTCTTTGAACCGAGGTAACTGGCTTGGA | |
| | | GGAGCGCAGTCACCAAAACTTGTCCTTTCAGTTTAGCCTTAACCGG | |
| | | CGCATGACTTCAAGACTAACTCCTCTAAATCAATTACCAGTGGCTG | |
| | | CTGCCAGTGGTGCTTTTGCATGTCTTTCCGGGTTGGACTCAAGACG | |
| | | ATAGTTACCGGATAAGGCGCAGCGGTCGGACTGAACGGGGGGTTCG | |
| | | TGCATACAGTCCAGCTTGGAGCGAACTGCCTACCCGGAACTGAGTG | |
| | | TCAGGCGTGGAATGAGACAAACGCGGCCATAACAGCGGAATGACAC | |
| | | CGGTAAACCGAAAGGCAGGAACAGGAGAGCGCACGAGGGAGCCGCC | |
| | | AGGGGAAACGCCTGGTATCTTTATAGTCCTGTCGGGTTTCGCCACC | |
| | | ACTGATTTGAGCGTCAGATTTCGTGATGCTTGTCAGGGGGGCGGAG | |
| | | CCTATGGAAAAACGGCTTTGCCGCGGCCCTCTCACTTCCCTGTTAA | |
| | | GTATCTTCCTGGCATCTTCCAGGAAATCTCCGCCCCGTTCGTAAGC | |
| | | CATTTCCGCTCGCCGCAGTCGAACGACCGAGCGTAGCGAGTCAGTG | |
| | | AGCGAGGAAGCGGAATATATCCTGTATCACATATTCTGCTGACGCA | |
| | | CCGGTGCAGCCTTTTTTCTCCTGCCACATGAAGCACTTCACTGACA | |
| | | CCCTCATCAGTGCCAACATAGTAAGCCAGTATACACTCCGCTA | |

TABLE 19
Plasmid Sequences

| | | | SEQ |
|---|---|---|---|
| | | | ID |
| Name^{a} | Description | Sequence^{b} | NO |
| pEG3017 | HIS₆-MBP- | CATTTCCCCGAAAAGTGCCACCTGACGTCTAAGAAACCATTATTATCATGACAT | 584 |
| | TruE* | TAACCTATAAAAATAGGCGTATCACGAGGCAGAATTTCAGATAAAAAAAATCCT | |
| | | TAGCTTTCGCTAAGGATGATTTCTGGAATTCGCGGCCGCTTCTAGAGGGCatcc | |
| | | cgaaaatttatcaaaaagagtattgacttaaagtctaacctataggatacttac | |
| | | [chemical structure] | |
| | | TCATATTACCACCATCACCATCATCACGACTATGATATTCCCACAAGCATGAAA | |
| | | ATCGAAGAAGGTAAACTGGTAATCTGGATTAACGGCGATAAAGGCTATAACGGA | |
| | | TTGGCTGAAGTCGGTAAGAAATTCGAGAAAGATACCGGAATTAAAGTCACCGTT | |
| | | GAGCATCCGGATAAACTGGAAGAGAAATTCCCACAGGTTGCGGCAACTGGCGAT | |
| | | GGCCCTGACATTATCTTCTGGGCACACGACCGCTTTGGTGGCTACGCTCAATCT | |
| | | GGCCTGTTGGCTGAAATCACCCCGGACAAAGCGTTCCAGGACAAGCTGTATCCG | |
| | | TTTACCTGGGATGCCGTACGTTACAACGGCAAGCTGATTGCTTACCCGATCGCT | |
| | | GTTGAAGCGTTATCGCTGATTTATAACAAAGATCTGCTGCCGAACCCGCCAAAA | |
| | | ACCTGGGAAGAGATCCCGGCGCTGGATAAAGAACTGAAAGCGAAAGGTAAGAGC | |
| | | GCGCTGATGTTCAACCTGCAAGAACCGTACTTCACCTGGCCGCTGATTGCTGCT | |
| | | GACGGGGGTTATGCGTTCAAGTATGAAAACGGCAAGTACGACATTAAAGACGTG | |
| | | GGCGTGGATAACGCTGGCGCGAAAGCGGGTCTGACCTTCCTGGTTGACCTGATT | |
| | | AAAAACAAACACATGAATGCAGACACCGATTACTCCATCGCAGAAGCTGCCTTT | |
| | | AATAAAGGCGAAACAGCGATGACCATCAACGGCCCGTGGGCATGGTCCAACATC | |
| | | GACACCAGCAAAGTGAATTATGGTGTAACGGTACTGCCGACCTTCAAGGGTCAA | |
| | | CCATCCAAACCGTTCGTTGGCGTGCTGAGCGCAGGTATTAACGCCGCCAGTCCG | |
| | | AACAAAGAGCTGGCGAAAGAGTTCCTCGAAAACTATCTGCTGACTGATGAAGGT | |
| | | CTGGAAGCGGTTAATAAAGACAAACCGCTGGGTGCCGTAGCGCTGAAGTCTTAC | |
| | | GAGGAAGAGTTGGCGAAAGATCCACGTATTGCCGCCACCATGGAAAACGCCCAG | |
| | | AAAGGTGAAATCATGCCGAACATCCCGCAGATGTCCGCTTTCTGGTATGCCGTG | |
| | | CGTACTGCGGTGATCAACGCCGCCAGCGGTCGTCAGACTGTCGATGAAGCCCTG | |
| | | AAAGACGCGCAGACTCGTATCACCAAGTCGTACTACCATCACCATCACCATCAC | |
| | | GGCGGTAGTGGCGAAAACCTGTATTTTCAGGGTATGAACAAGAAGAACATTTTA | |
| | | CCGCAGTTAGGACAACCAGTCATCCGCCTTACTGCCGGTCAACTGTCAAGCCAA | |
| | | CTGGCGGAGCTTTCTGAGGAGGCTCTGGGAGGGGTCGATGCCTCGTACGCGGTG | |
| | | TTCTGGCCGATCTGTAGCTATGACGACTAATAATTCAGCCAAAAAACTTAAGAC | |
| | | CGCCGGTCTTGTCCACTACCTTGCAGTAATGCGGTGGACAGGATCGGCGGTTTT | |
| | | CTTTTCTCTTCTCAACTGTACTAGTAGCGGCCGCTGCAGTCCGGCAAAAAAGGG | |
| | | CAAGGTGTCACCACCCTGCCCTTTTTCTTTAAAACCGAAAAGATTACTTCGCGT | |
| | | TATGCAGGCTTCCTCGCTCACTGACTCGCTGCGCTCGGTCGTTCGGCTGCGGCG | |
| | | AGCGGTATCAGCTCACTCAAAGGCGGTAATGACAGTAAGACGGGTAAGCCTGTT | |
| | | GATGATACCGCTGCCTTACTGGGTGCATTAGCCAGTCTGAATGACCTGTCACGG | |
| | | GATAATCCGAAGTGGTCAGACTGGAAAATCAGAGGGCAGGAACTGCTGAACAGC | |
| | | AAAAAGTCAGATAGCACCACATAGCAGACCCGCCATAAAACGCCCTGAGAAGCC | |
| | | CGTGACGGGCTTTTCTTGTATTATGGGTAGTTTCCTTGCATGAATCCATAAAAG | |
| | | GCGCCTGTAGTGCCATTTACCCCCATTCACTGCCAGAGCCGTGAGCGCAGCGAA | |
| | | CTGAATGTCACGAAAAAGACAGCGACTCAGGTGCCTGATGGTCGGAGACAAAAG | |
| | | GAATATTCAGCGATTTGCCCGAGCTTGCGAGGGTGCTACTTAAGCCTTTAGGGT | |
| | | TTTAAGGTCTGTTTTGTAGAGGAGCAAACAGCGTTTGCGACATCCTTTTGTAAT | |
| | | ACTGCGGAACTGACTAAAGTAGTGAGTTATACACAGGGCTGGGATCTATTCTTT | |
| | | TTATCTTTTTTTATTCTTTCTTTATTCTATAAATTATAACCACTTGAATATAAA | |
| | | CAAAAAAAACACACAAAGGTCTAGCGGAATTTACAGAGGGTCTAGCAGAATTTA | |
| | | CAAGTTTTCCAGCAAAGGTCTAGCAGAATTTACAGATACCCACAACTCAAAGGA | |
| | | AAAGGACTAGTAATTATCATTGACTAGCCCATCTCAATTGGTATAGTGATTAAA | |
| | | ATCACCTAGACCAATTGAGATGTATGTCTGAATTAGTTGTTTTCAAAGCAAATG | |
| | | AACTAGCGATTAGTCGCTATGACTTAACGGAGCATGAAACCAAGCTAATTTTAT | |
| | | GCTGTGTGGCACTACTCAACCCCACGATTGAAAACCCTACAAGGAAAGAACGGA | |
| | | CGGTATCGTTCACTTATAACCAATACGCTCAGATGATGAACATCAGTAGGGAAA | |
| | | ATGCTTATGGTGTATTAGCTAAAGCAACCAGAGAGCTGATGACGAGAACTGTGG | |
| | | AAATCAGGAATCCTTTGGTTAAAGGCTTTTGGATTTTCCAGTGGACAAACTATG | |
| | | CCAAGTTCTCAAGCGAAAAATTAGAATTAGTTTTTAGTGAAGAGATATTGCCTT | |
| | | ATCTTTTCCAGTTAAAAAAATTCATAAAATATAATCTGGAACATGTTAAGTCTT | |
| | | TTGAAAACAAATACTCTATGAGGATTTATGAGTGGTTATTAAAAGAACTAACAC | |
| | | AAAAGAAAACTCACAAGGCAAATATAGAGATTAGCCTTGATGAATTTAAGTTCA | |
| | | TGTTAATGCTTGAAAATAACTACCATGAGTTTAAAAGGCTTAACCAATGGGTTT | |
| | | TGAAACCAATAAGTAAAGATTTAAACACTTACAGCAATATGAAATTGGTGGTTG | |
| | | ATAAGCGAGGCCGCCCGACTGATACGTTGATTTTCCAAGTTGAACTAGATAGAC | |
| | | AAATGGATCTCGTAACCGAACTTGAGAACAACCAGATAAAAATGAATGGTGACA | |
| | | AAATACCAACAACCATTACATCAGATTCCTACCTACATAACGGACTAAGAAAAA | |
| | | CACTACACGATGCTTTAACTGCAAAAATTCAGCTCACCAGTTTTGAGGCAAAAT | |
| | | TTTTGAGTGACATGCAAAGTAAGTATGATCTCAATGGTTCGTTCTCATGGCTCA | |
| | | CGCAAAAACAACGAACCACACTAGAGAACATACTGGCTAAATACGGAAGGATCT | |
| | | GAGGTTCTTATGGCTCTTGTATCTATCAGTGAAGCATCAAGACTAACAAACAAA | |
| | | AGTAGAACAACTGTTCACCGTTACATATCAAAGGGAAAACTGTCCATATGCACA | |
| | | GATGAAAACGGTGTAAAAAAGATAGATACATCAGAGCTTTTACGAGTTTTTGGT | |
| | | GCATTCAAAGCTGTTCACCATGAACAGATCGACAATGTAACAGATGAACAGCAT | |
| | | GTAACACCTAATAGAACAGGTGAAACCAGTAAAACAAAGCAACTAGAACATGAA | |
| | | ATTGAACACCTGAGACAACTTGTTACAGCTCAACAGTCACACATAGACAGCCTG | |
| | | AAACAGGCGATGCTGCTTATCGAATCAAAGCTGCCGACAACACGGGAGCCAGTG | |
| | | ACGCCTCCCGTGGGGAAAAAATCATGGCAATTCTGGAAGAAATAGCGCTTTCAG | |
| | | CCGGCAAACCGGCTGAAGCCGGATCTGCGATTCTGATAACAAACTAGCAACACC | |
| | | AGAACAGCCCGTTTGCGGGCAGCAAAACCCGTACCGATTATCAAAAAGGATCTT | |
| | | CACCTAGATCCTTTTAAATTAAAAATGAAGTTTTAAATCAATCTAAAGTATATA | |
| | | TGAGTAAACTTGGTCTGATTACGCCCCGCCCTGCCACTCATCACAGTACTGTTG | |
| | | TAATTCATTAAGCATGCGGCCGACATGGAAGCCATCACAAACGGCATGATGAAC | |
| | | CTGGATCGCCAGCGGCATCAGCACCTTGTCGCCTTGCGTATAATATTTGCCCAT | |
| | | CGTGAAAACGGGGGCGAAGAAGTTGTCCATATTGGCCACGTTTAAATCAAAACT | |
| | | GGTGAAACTCACCCAGGGATTGGCTGAGACAAAAAACATATTCTCAATAAACCC | |
| | | TTTAGGGAAATAGGCCAGGTTTTCACCGTAACACGCCACATCTTGCGAATATAT | |
| | | GTGGAGAAACTGCCGGAAATCGTCGTGGTATTCACTCCAGAGGGACGAAAACGT | |
| | | TTCAGTTTGCTCATGGAAAACGGTGTAACAAGGGTGAACACTATCCCAGATCAC | |
| | | CAGCTCACCGTCTTTCATGGCCATACGAAACTCCGGGTGAGCGTTCATCAGGCG | |
| | | GGCAAGAATGTGAATAAAGGCCGGATAAAACTTGTGCTTATTTTTCTTTACGGT | |
| | | CTTTAAAAAGGCCGTAATATCCAGCTGAACGGTCTGGTTATAGGTACATTGAGC | |
| | | AACTGACTGAAATGCCTCAAAATGTTCTTTACGATGCCATTGGGATATATCAAC | |
| | | GGTGGTATATCCCGTGATTTTTTTCTCCATACTCTTCCTTTTTCAATATTATTG | |
| | | AAGCATTTATCAGGGTTATTGTCTCATGAGCGGATACATATTTGAATGTATTTA | |
| | | GAAAAATAAACAAATAGGGGTTCCGCG | |
| bEG_S2 | N-term | CACATTTCCCCGAAAAGTGCCACCTGACGTCTAAGAAACCATTATTATCATGAC | 585 |
| | HIS₆-Tag | ATTAACCTATAAAAATAGGCGTATCACGAGGCAGAATTTCAGATAAAAAAAATC | |
| | with ATag- | CTTAGCTTTCGCTAAGGATGATTTCTGGAATTCGCGGCCGCTTCTAGAGGGAGA | |
| | 1 | ACGATCGTTGGCTGaatcataaaaaatttatttgctttgtgagcggataacaat | |
| | | [chemical structure] | |
| | | [chemical structure] | |
| | | ATATTCCCACAAGCGAGAACTTGTACTTTCAAGGGATGAGCAAAGGAGAAGAAC | |
| | | TTTTCACTGGAGTTGTCCCAATTCTTGTTGAATTAGATGGTGATGTTAATGGGC | |
| | | ACAAATTTTCTGTCCGTGGAGAGGGTGAAGGTGATGCTACAAACGGAAAACTCA | |
| | | CCCTTAAATTTATTTGCACTACTGGAAAACTACCTGTTCCGTGGCCAACACTTG | |
| | | TCACTACTCTGACCTATGGTGTTCAATGCTTTTCCCGTTATCCGGATCACATGA | |
| | | AACGGCATGACTTTTTCAAGAGTGCCATGCCCGAAGGTTATGTACAGGAACGCA | |
| | | CTATATCTTTCAAAGATGACGGGACCTACAAGACGCGTGCTGAAGTCAAGTTTG | |
| | | AAGGTGATACCCTTGTTAATCGTATCGAGTTAAAGGGTATTGATTTTAAAGAAG | |
| | | ATGGAAACATTCTTGGACACAAACTCGAGTACAACTTTAACTCACACAATGTAT | |
| | | ACATCACGGCAGACAAACAAAAGAATGGAATCAAAGCTAACTTCAAAATTCGCC | |
| | | ACAACGTTGAAGATGGTTCCGTTCAACTAGCAGACCATTATCAACAAAATACTC | |
| | | CAATTGGCGATGGCCCTGTCCTTTTACCAGACAACCATTACCTGTCGACACAAT | |
| | | CTGTCCTTTCGAAAGATCCCAACGAAAAGCGTGACCACATGGTCCTTCTTGAGT | |
| | | TTGTAACTGCTGCTGGGATTACACATGGCATGGATGAGCTCTACAAATAATTCA | |
| | | GCCAAAAAACTTAAGACCGCCGGTCTTGTCCACTACCTTGCAGTAATGCGGTGG | |
| | | ACAGGATCGGCGGTTTTCTTTTCTCTTCTCAACCAATGgcggcgcgccatcgaa | |
| | | [chemical structure] | |
| | | [chemical structure] | |
| | | GTCTCTTATCAGACCGTTTCCCGCGTGGTGAACCAGGCCAGCCACGTTTCTGCG | |
| | | AAAACGCGGGAAAAAGTGGAAGCGGCGATGGCGGAGCTGAATTACATTCCCAAC | |
| | | CGCGTGGCACAACAACTGGCGGGCAAACAGTCGTTGCTTATTGGCGTTGCCACC | |
| | | TCCAGTCTGGCCCTGCACGCGCCGTCGCAAATTGTCGCGGCGATTAAATCTCGC | |
| | | GCCGATCAACTGGGTGCCAGCGTGGTGGTGTCGATGGTAGAACGAAGCGGCGTC | |
| | | GAAGCCTGTAAAGCGGCGGTGCACAATCTTCTCGCGCAACGCGTCAGTGGGCTG | |
| | | ATCATTAACTATCCGCTGGATGACCAGGATGCCATTGCTGTGGAAGCTGCCTGC | |
| | | ACTAATGTTCCGGCGTTATTTCTTGATGTCTCTGACCAGACACCCATCAACAGT | |
| | | ATTATTTTCTCCCATGAGGACGGTACGCGACTGGGCGTGGAGCATCTGGTCGCA | |
| | | TTGGGTCACCAGCAAATCGCGCTGTTAGCGGGCCCATTAAGTTCTGTCTCGGCG | |
| | | CGTCTGCGTCTGGCTGGCTGGCATAAATATCTCACTCGCAATCAAATTCAGCCG | |
| | | ATAGCGGAACGGGAAGGCGACTGGAGTGCCATGTCCGGTTTTCAACAAACCATG | |
| | | CAAATGCTGAATGAGGGCATCGTTCCCACTGCGATGCTGGTTGCCAACGATCAG | |
| | | ATGGCGCTGGGCGCAATGCGCGCCATTACCGAGTCCGGGCTGCGCGTTGGTGCG | |
| | | GATATCTCGGTAGTGGGATACGACGATACCGAAGATAGCTCATGTTATATCCCG | |
| | | CCGTTAACCACCATCAAACAGGATTTTCGCCTGCTGGGGCAAACCAGCGTGGAC | |
| | | CGCTTGCTGCAACTCTCTCAGGGCCAGGCGGTGAAGGGCAATCAGCTGTTGCCA | |
| | | GTCTCACTGGTGAAAAGAAAAACCACCCTGGCGCCCAATACGCAAACCGCCTCT | |
| | | CCCCGCGCGTTGGCCGATTCATTAATGCAGCTGGCACGACAGGTTTCCCGACTG | |
| | | GAAAGCGGGCAGTGATAATTGGTAACGAATCAGACAATTGACGGCTCGAGGGAG | |
| | | TAGCATAGGGTTTGCAGAATCCCTGCTTCGTCCATTTGACAGGCACATTATGCA | |
| | | TCGATGATAAGCTGTCAAACATGAGCACGCTTACTAGTAGCGGCCGCTGCAGTC | |
| | | CGGCAAAAAAGGGCAAGGTGTCACCACCCTGCCCTTTTTCTTTAAAACCGAAAA | |
| | | GATTACTTCGCGTTATGCAGGCTTCCTCGCTCACTGACTCGCTGCGCTCGGTCG | |
| | | TTCGGCTGCGGCGAGCGGTATCAGCTCACTCAAAGGCGGTAATGACAGTAAGAC | |
| | | GGGTAAGCCTGTTGATGATACCGCTGCCTTACTGGGTGCATTAGCCAGTCTGAA | |
| | | TGACCTGTCACGGGATAATCCGAAGTGGTCAGACTGGAAAATCAGAGGGCAGGA | |
| | | ACTGCTGAACAGCAAAAAGTCAGATAGCACCACATAGCAGACCCGCCATAAAAC | |
| | | GCCCTGAGAAGCCCGTGACGGGCTTTTCTTGTATTATGGGTAGTTTCCTTGCAT | |
| | | GAATCCATAAAAGGCGCCTGTAGTGCCATTTACCCCCATTCACTGCCAGAGCCG | |
| | | TGAGCGCAGCGAACTGAATGTCACGAAAAAGACAGCGACTCAGGTGCCTGATGG | |
| | | TCGGAGACAAAAGGAATATTCAGCGATTTGCCCGAGCTTGCGAGGGTGCTACTT | |
| | | AAGCCTTTAGGGTTTTAAGGTCTGTTTTGTAGAGGAGCAAACAGCGTTTGCGAC | |
| | | ATCCTTTTGTAATACTGCGGAACTGACTAAAGTAGTGAGTTATACACAGGGCTG | |
| | | GGATCTATTCTTTTTATCTTTTTTTATTCTTTCTTTATTCTATAAATTATAACC | |
| | | ACTTGAATATAAACAAAAAAAACACACAAAGGTCTAGCGGAATTTACAGAGGGT | |
| | | CTAGCAGAATTTACAAGTTTTCCAGCAAAGGTCTAGCAGAATTTACAGATACCC | |
| | | ACAACTCAAAGGAAAAGGACTAGTAATTATCATTGACTAGCCCATCTCAATTGG | |
| | | TATAGTGATTAAAATCACCTAGACCAATTGAGATGTATGTCTGAATTAGTTGTT | |
| | | TTCAAAGCAAATGAACTAGCGATTAGTCGCTATGACTTAACGGAGCATGAAACC | |
| | | AAGCTAATTTTATGCTGTGTGGCACTACTCAACCCCACGATTGAAAACCCTACA | |
| | | AGGAAAGAACGGACGGTATCGTTCACTTATAACCAATACGCTCAGATGATGAAC | |
| | | ATCAGTAGGGAAAATGCTTATGGTGTATTAGCTAAAGCAACCAGAGAGCTGATG | |
| | | ACGAGAACTGTGGAAATCAGGAATCCTTTGGTTAAAGGCTTTTGGATTTTCCAG | |
| | | TGGACAAACTATGCCAAGTTCTCAAGCGAAAAATTAGAATTAGTTTTTAGTGAA | |
| | | GAGATATTGCCTTATCTTTTCCAGTTAAAAAAATTCATAAAATATAATCTGGAA | |
| | | CATGTTAAGTCTTTTGAAAACAAATACTCTATGAGGATTTATGAGTGGTTATTA | |
| | | AAAGAACTAACACAAAAGAAAACTCACAAGGCAAATATAGAGATTAGCCTTGAT | |
| | | GAATTTAAGTTCATGTTAATGCTTGAAAATAACTACCATGAGTTTAAAAGGCTT | |
| | | AACCAATGGGTTTTGAAACCAATAAGTAAAGATTTAAACACTTACAGCAATATG | |
| | | AAATTGGTGGTTGATAAGCGAGGCCGCCCGACTGATACGTTGATTTTCCAAGTT | |
| | | GAACTAGATAGACAAATGGATCTCGTAACCGAACTTGAGAACAACCAGATAAAA | |
| | | ATGAATGGTGACAAAATACCAACAACCATTACATCAGATTCCTACCTACATAAC | |
| | | GGACTAAGAAAAACACTACACGATGCTTTAACTGCAAAAATTCAGCTCACCAGT | |
| | | TTTGAGGCAAAATTTTTGAGTGACATGCAAAGTAAGTATGATCTCAATGGTTCG | |
| | | TTCTCATGGCTCACGCAAAAACAACGAACCACACTAGAGAACATACTGGCTAAA | |
| | | TACGGAAGGATCTGAGGTTCTTATGGCTCTTGTATCTATCAGTGAAGCATCAAG | |
| | | ACTAACAAACAAAAGTAGAACAACTGTTCACCGTTACATATCAAAGGGAAAACT | |
| | | GTCCATATGCACAGATGAAAACGGTGTAAAAAAGATAGATACATCAGAGCTTTT | |
| | | ACGAGTTTTTGGTGCATTCAAAGCTGTTCACCATGAACAGATCGACAATGTAAC | |
| | | AGATGAACAGCATGTAACACCTAATAGAACAGGTGAAACCAGTAAAACAAAGCA | |
| | | ACTAGAACATGAAATTGAACACCTGAGACAACTTGTTACAGCTCAACAGTCACA | |
| | | CATAGACAGCCTGAAACAGGCGATGCTGCTTATCGAATCAAAGCTGCCGACAAC | |
| | | ACGGGAGCCAGTGACGCCTCCCGTGGGGAAAAAATCATGGCAATTCTGGAAGAA | |
| | | ATAGCGCTTTCAGCCGGCAAACCGGCTGAAGCCGGATCTGCGATTCTGATAACA | |
| | | AACTAGCAACACCAGAACAGCCCGTTTGCGGGCAGCAAAACCCGTACCGATTAT | |
| | | CAAAAAGGATCTTCACCTAGATCCTTTTAAATTAAAAATGAAGTTTTAAATCAA | |
| | | TCTAAAGTATATATGAGTAAACTTGGTCTGACAGTTACCAATGCTTAATCAGTG | |
| | | AGGCACCTATCTCAGCGATCTGTCTATTTCGTTCATCCATAGTTGCCTGACTCC | |
| | | CCGTCGTGTAGATAACTACGATACGGGAGGGCTTACCATCTGGCCCCAGTGCTG | |
| | | CAATGATACCGCGAGAACCACGCTCACCGGCTCCAGATTTATCAGCAATAAACC | |
| | | AGCCAGCCGGAAGGGCCGAGCGCAGAAGTGGTCCTGCAACTTTATCCGCCTCCA | |
| | | TCCAGTCTATTAATTGTTGCCGGGAAGCTAGAGTAAGTAGTTCGCCAGTTAATA | |
| | | GTTTGCGCAACGTTGTTGCCATTGCTACAGGCATCGTGGTGTCACGCTCGTCGT | |
| | | TTGGTATGGCTTCATTCAGCTCCGGTTCCCAACGATCAAGGCGAGTTACATGAT | |
| | | CCCCCATGTTGTGCAAAAAAGCGGTTAGCTCCTTCGGTCCTCCGATCGTTGTCA | |
| | | GAAGTAAGTTGGCCGCAGTGTTATCACTCATGGTTATGGCAGCACTGCATAATT | |
| | | CTCTTACTGTCATGCCATCCGTAAGATGCTTTTCTGTGACTGGTGAGTACTCAA | |
| | | CCAAGTCATTCTGAGAATAGTGTATGCGGCGACCGAGTTGCTCTTGCCCGGCGT | |
| | | CAATACGGGATAATACCGCGCCACATAGCAGAACTTTAAAAGTGCTCATCATTG | |
| | | GAAAACGTTCTTCGGGGCGAAAACTCTCAAGGATCTTACCGCTGTTGAGATCCA | |
| | | GTTCGATATAACCCACTCGTGCACCCAACTGATCTTCAGCATCTTTTACTTTCA | |
| | | CCAGCGTTTCTGGGTGAGCAAAAACAGGAAGGCAAAATGCCGCAAAAAAGGGAA | |
| | | TAAGGGCGACACGGAAATGTTGAATACTCATACTCTTCCTTTTTCAATATTATT | |
| | | GAAGCATTTATCAGGGTTATTGTCTCATGAGCGGATACATATTTGAATGTATTT | |
| | | AGAAAAATAAACAAATAGGGGTTCCGCG | |
| pEG3045 | HIS₆-MdnA | ATGGCATATCCCAACGATCAACAAGGTAAAGCACTTCCTTTCTTTGCTCGTTTC | 586 |
| | | TTGTCCGTAAGCAAAGAGGAATCTTCCATCAAGTCTCCTTCCCCTGAGCCTACC | |
| | | TACGGGGGCACCTTTAAATACCCTTCTGACTGGGAAGATTATTAATAA | |
| pEG3046 | HIS₆-BmbC | ATGGGTCCGGTTGTTGTGTTCGATTGCATGACGGCCGACTTTCTGAACGACGAT | 587 |
| | | CCAAATAACGCGGAGTTGTCTGCCTTGGAAATGGAGGAGCTCGAGTCCTGGGGC | |
| | | GCCTGGGACGGAGAGGCTACCAGCTAGTAA | |
| pEG3047 | HIS₆-StrA | ATGAGTAAGGAATTAGAAAAAGTTCTTGAATCCAGTTCAATGGCAAAGGGGGAC | 588 |
| | | GGCTGGAAGGTTATGGCTAAAGGTGACGGTTGGGAGTAATAA | |
| pEG3048 | HIS₆-PqqA | ATGTGGAAGAAACCTGCTTTTATCGATTTACGTCTCGGTCTGGAAGTGACGCTG | 589 |
| | | TACATTTCTAACCGTTAATAA | |
| pEG3049 | HIS₆-SboA | ATGAAAAAAGCTGTCATTGTAGAAAACAAAGGTTGTGCAACATGCTCGATCGGA | 590 |
| | | GCCGCTTGTCTAGTGGACGGTCCTATCCCTGATTTTGAAATTGCCGGTGCAACA | |
| | | GGTCTATTCGGTCTATGGGGATAA | |
| pEG3051 | HIS₆-TfxA | ATGGATAACAAGGTTGCGAAGAATGTCGAAGTGAAGAAGGGCTCCATCAAGGCG | 591 |
| | | ACCTTCAAGGCTGCTGTTCTGAAGTCGAAGACGAAGGTCGACATCGGAGGTAGC | |
| | | CGTCAGGGCTGCGTCGCTTAATAA | |
| pEG3052 | HIS₆- | ATGTCAGAAGAACAACTCAAGGCATTCATTGCCAAGGTTCAAGCAGACACTTCA | 592 |
| | ProcA1.7 | CTGCAGGAACAGCTCAAAGTAGAAGGTGCTGATGTTGTTGCTATTGCTAAAGCC | |
| | | TCAGGGTTCGCGATTACCACAGAGGACTTAAAAGCACATCAAGCCAACTCACAA | |
| | | AAGAACCTGTCTGATGCTGAGCTGGAAGGTGTGGCTGGGCGAACCATTGGGGGA | |
| | | ACCATTGTGTCGATAACCTGTGAGACTTGCGATCTGCTTGTGGGGAAAATGTGC | |
| | | TGATAA | |
| PEG3053 | HIS₆-TbtA | ATGGACCTGAATGATCTGCCGATGGATGTTTTTGAACTGGCAGATAGCGGTGTT | 593 |
| | | GCAGTTGAAAGCCTGACCGCAGGTCATGGTATGACCGAAGTTGGTGCAAGCTGT | |
| | | AATTGCTTTTGTTATATTTGTTGTAGCTGCAGCAGCGCCTAATAA | |
| pEG3055 | HIS₆-Pgm2 | ATGGAGCGCGAAATCGTGTGGACAGAAATTGAGGAGTCGGATTTAGCCGCCGTC | 594 |
| | | GTGTCGGCATCTAATGTCAAGGATGGTCCAACCGTTAGCTCAAGTAATGTAAAG | |
| | | GACCGCTAATAA | |
| bEG_S3 | RST_{N}* | CACATTTCCCCGAAAAGTGCCACCTGACGTCTAAGAAACCATTATTATCATGAC | 595 |
| | expression | ATTAACCTATAAAAATAGGCGTATCACGAGGCAGAATTTCAGATAAAAAAAATC | |
| | vector | CTTAGCTTTCGCTAAGGATGATTTCTGGAATTCGCGGCCGCTTCTAGAGGGAGA | |
| | | ACGATCGTTGGCTGaatcataaaaaatttatttgctttgtgagcggataacaat | |
| | | [chemical structure] | |
| | | [chemical structure] | |
| | | TGCAGGACTCAGAAGTCAATCAAGAAGCTAAGCCAGAGGTCAAGCCAGAAGTCA | |
| | | AGCCTGAGACTCACATCAATTTAAAGGTGTCCGATGGATCTTCAGAGATCTTCT | |
| | | TCAAGATCAAAAAGACCACTCCTTTAAGAAGGCTGATGGAAGCGTTCGCTAAAA | |
| | | GACAGGGTAAGGAAATGGACTCCTTAAGATTCTTGTACGACGGTATTAGAATTC | |
| | | AAGCTGATCAGGCCCCTGAAGATTTGGACATGGAGGATAACGATATTATTGAGG | |
| | | CTCACCGCGAACAGATTGGAGGTCATCACCATCACCACCATGGATATGATATTA | |
| | | GCACAGGTATGAGCAAAGGAGAAGAACTTTTCACTGGAGTTGTCCCAATTCTTG | |
| | | TTGAATTAGATGGTGATGTTAATGGGCACAAATTTTCTGTCCGTGGAGAGGGTG | |
| | | AAGGTGATGCTACAAACGGAAAACTCACCCTTAAATTTATTTGCACTACTGGAA | |
| | | AACTACCTGTTCCGTGGCCAACACTTGTCACTACTCTGACCTATGGTGTTCAAT | |
| | | GCTTTTCCCGTTATCCGGATCACATGAAACGGCATGACTTTTTCAAGAGTGCCA | |
| | | TGCCCGAAGGTTATGTACAGGAACGCACTATATCTTTCAAAGATGACGGGACCT | |
| | | ACAAGACGCGTGCTGAAGTCAAGTTTGAAGGTGATACCCTTGTTAATCGTATCG | |
| | | AGTTAAAGGGTATTGATTTTAAAGAAGATGGAAACATTCTTGGACACAAACTCG | |
| | | AGTACAACTTTAACTCACACAATGTATACATCACGGCAGACAAACAAAAGAATG | |
| | | GAATCAAAGCTAACTTCAAAATTCGCCACAACGTTGAAGATGGTTCCGTTCAAC | |
| | | TAGCAGACCATTATCAACAAAATACTCCAATTGGCGATGGCCCTGTCCTTTTAC | |
| | | CAGACAACCATTACCTGTCGACACAATCTGTCCTTTCGAAAGATCCCAACGAAA | |
| | | AGCGTGACCACATGGTCCTTCTTGAGTTTGTAACTGCTGCTGGGATTACACATG | |
| | | GCATGGATGAGCTCTACAAATAATTCAGCCAAAAAACTTAAGACCGCCGGTCTT | |
| | | GTCCACTACCTTGCAGTAATGCGGTGGACAGGATCGGCGGTTTTCTTTTCTCTT | |
| | | CTCAACCAATGgcggcgcgccatcgaatggcgcaaaacctttcgcggtatggca | |
| | | [chemical structure] | |
| | | TTATACGATGTCGCAGAGTATGCCGGTGTCTCTTATCAGACCGTTTCCCGCGTG | |
| | | GTGAACCAGGCCAGCCACGTTTCTGCGAAAACGCGGGAAAAAGTGGAAGCGGCG | |
| | | ATGGCGGAGCTGAATTACATTCCCAACCGCGTGGCACAACAACTGGCGGGCAAA | |
| | | CAGTCGTTGCTTATTGGCGTTGCCACCTCCAGTCTGGCCCTGCACGCGCCGTCG | |
| | | CAAATTGTCGCGGCGATTAAATCTCGCGCCGATCAACTGGGTGCCAGCGTGGTG | |
| | | GTGTCGATGGTAGAACGAAGCGGCGTCGAAGCCTGTAAAGCGGCGGTGCACAAT | |
| | | CTTCTCGCGCAACGCGTCAGTGGGCTGATCATTAACTATCCGCTGGATGACCAG | |
| | | GATGCCATTGCTGTGGAAGCTGCCTGCACTAATGTTCCGGCGTTATTTCTTGAT | |
| | | GTCTCTGACCAGACACCCATCAACAGTATTATTTTCTCCCATGAGGACGGTACG | |
| | | CGACTGGGCGTGGAGCATCTGGTCGCATTGGGTCACCAGCAAATCGCGCTGTTA | |
| | | GCGGGCCCATTAAGTTCTGTCTCGGCGCGTCTGCGTCTGGCTGGCTGGCATAAA | |
| | | TATCTCACTCGCAATCAAATTCAGCCGATAGCGGAACGGGAAGGCGACTGGAGT | |
| | | GCCATGTCCGGTTTTCAACAAACCATGCAAATGCTGAATGAGGGCATCGTTCCC | |
| | | ACTGCGATGCTGGTTGCCAACGATCAGATGGCGCTGGGCGCAATGCGCGCCATT | |
| | | ACCGAGTCCGGGCTGCGCGTTGGTGCGGATATCTCGGTAGTGGGATACGACGAT | |
| | | ACCGAAGATAGCTCATGTTATATCCCGCCGTTAACCACCATCAAACAGGATTTT | |
| | | CGCCTGCTGGGGCAAACCAGCGTGGACCGCTTGCTGCAACTCTCTCAGGGCCAG | |
| | | GCGGTGAAGGGCAATCAGCTGTTGCCAGTCTCACTGGTGAAAAGAAAAACCACC | |
| | | CTGGCGCCCAATACGCAAACCGCCTCTCCCCGCGCGTTGGCCGATTCATTAATG | |
| | | CAGCTGGCACGACAGGTTTCCCGACTGGAAAGCGGGCAGTGATAATTGGTAACG | |
| | | AATCAGACAATTGACGGCTCGAGGGAGTAGCATAGGGTTTGCAGAATCCCTGCT | |
| | | TCGTCCATTTGACAGGCACATTATGCATCGATGATAAGCTGTCAAACATGAGCA | |
| | | CGCTTACTAGTAGCGGCCGCTGCAGTCCGGCAAAAAAGGGCAAGGTGTCACCAC | |
| | | CCTGCCCTTTTTCTTTAAAACCGAAAAGATTACTTCGCGTTATGCAGGCTTCCT | |
| | | CGCTCACTGACTCGCTGCGCTCGGTCGTTCGGCTGCGGCGAGCGGTATCAGCTC | |
| | | ACTCAAAGGCGGTAATGACAGTAAGACGGGTAAGCCTGTTGATGATACCGCTGC | |
| | | CTTACTGGGTGCATTAGCCAGTCTGAATGACCTGTCACGGGATAATCCGAAGTG | |
| | | GTCAGACTGGAAAATCAGAGGGCAGGAACTGCTGAACAGCAAAAAGTCAGATAG | |
| | | CACCACATAGCAGACCCGCCATAAAACGCCCTGAGAAGCCCGTGACGGGCTTTT | |
| | | CTTGTATTATGGGTAGTTTCCTTGCATGAATCCATAAAAGGCGCCTGTAGTGCC | |
| | | ATTTACCCCCATTCACTGCCAGAGCCGTGAGCGCAGCGAACTGAATGTCACGAA | |
| | | AAAGACAGCGACTCAGGTGCCTGATGGTCGGAGACAAAAGGAATATTCAGCGAT | |
| | | TTGCCCGAGCTTGCGAGGGTGCTACTTAAGCCTTTAGGGTTTTAAGGTCTGTTT | |
| | | TGTAGAGGAGCAAACAGCGTTTGCGACATCCTTTTGTAATACTGCGGAACTGAC | |
| | | TAAAGTAGTGAGTTATACACAGGGCTGGGATCTATTCTTTTTATCTTTTTTTAT | |
| | | TCTTTCTTTATTCTATAAATTATAACCACTTGAATATAAACAAAAAAAACACAC | |
| | | AAAGGTCTAGCGGAATTTACAGAGGGTCTAGCAGAATTTACAAGTTTTCCAGCA | |
| | | AAGGTCTAGCAGAATTTACAGATACCCACAACTCAAAGGAAAAGGACTAGTAAT | |
| | | TATCATTGACTAGCCCATCTCAATTGGTATAGTGATTAAAATCACCTAGACCAA | |
| | | TTGAGATGTATGTCTGAATTAGTTGTTTTCAAAGCAAATGAACTAGCGATTAGT | |
| | | CGCTATGACTTAACGGAGCATGAAACCAAGCTAATTTTATGCTGTGTGGCACTA | |
| | | CTCAACCCCACGATTGAAAACCCTACAAGGAAAGAACGGACGGTATCGTTCACT | |
| | | TATAACCAATACGCTCAGATGATGAACATCAGTAGGGAAAATGCTTATGGTGTA | |
| | | TTAGCTAAAGCAACCAGAGAGCTGATGACGAGAACTGTGGAAATCAGGAATCCT | |
| | | TTGGTTAAAGGCTTTTGGATTTTCCAGTGGACAAACTATGCCAAGTTCTCAAGC | |
| | | GAAAAATTAGAATTAGTTTTTAGTGAAGAGATATTGCCTTATCTTTTCCAGTTA | |
| | | AAAAAATTCATAAAATATAATCTGGAACATGTTAAGTCTTTTGAAAACAAATAC | |
| | | TCTATGAGGATTTATGAGTGGTTATTAAAAGAACTAACACAAAAGAAAACTCAC | |
| | | AAGGCAAATATAGAGATTAGCCTTGATGAATTTAAGTTCATGTTAATGCTTGAA | |
| | | AATAACTACCATGAGTTTAAAAGGCTTAACCAATGGGTTTTGAAACCAATAAGT | |
| | | AAAGATTTAAACACTTACAGCAATATGAAATTGGTGGTTGATAAGCGAGGCCGC | |
| | | CCGACTGATACGTTGATTTTCCAAGTTGAACTAGATAGACAAATGGATCTCGTA | |
| | | ACCGAACTTGAGAACAACCAGATAAAAATGAATGGTGACAAAATACCAACAACC | |
| | | ATTACATCAGATTCCTACCTACATAACGGACTAAGAAAAACACTACACGATGCT | |
| | | TTAACTGCAAAAATTCAGCTCACCAGTTTTGAGGCAAAATTTTTGAGTGACATG | |
| | | CAAAGTAAGTATGATCTCAATGGTTCGTTCTCATGGCTCACGCAAAAACAACGA | |
| | | ACCACACTAGAGAACATACTGGCTAAATACGGAAGGATCTGAGGTTCTTATGGC | |
| | | TCTTGTATCTATCAGTGAAGCATCAAGACTAACAAACAAAAGTAGAACAACTGT | |
| | | TCACCGTTACATATCAAAGGGAAAACTGTCCATATGCACAGATGAAAACGGTGT | |
| | | AAAAAAGATAGATACATCAGAGCTTTTACGAGTTTTTGGTGCATTCAAAGCTGT | |
| | | TCACCATGAACAGATCGACAATGTAACAGATGAACAGCATGTAACACCTAATAG | |
| | | AACAGGTGAAACCAGTAAAACAAAGCAACTAGAACATGAAATTGAACACCTGAG | |
| | | ACAACTTGTTACAGCTCAACAGTCACACATAGACAGCCTGAAACAGGCGATGCT | |
| | | GCTTATCGAATCAAAGCTGCCGACAACACGGGAGCCAGTGACGCCTCCCGTGGG | |
| | | GAAAAAATCATGGCAATTCTGGAAGAAATAGCGCTTTCAGCCGGCAAACCGGCT | |
| | | GAAGCCGGATCTGCGATTCTGATAACAAACTAGCAACACCAGAACAGCCCGTTT | |
| | | GCGGGCAGCAAAACCCGTACCGATTATCAAAAAGGATCTTCACCTAGATCCTTT | |
| | | TAAATTAAAAATGAAGTTTTAAATCAATCTAAAGTATATATGAGTAAACTTGGT | |
| | | CTGACAGTTACCAATGCTTAATCAGTGAGGCACCTATCTCAGCGATCTGTCTAT | |
| | | TTCGTTCATCCATAGTTGCCTGACTCCCCGTCGTGTAGATAACTACGATACGGG | |
| | | AGGGCTTACCATCTGGCCCCAGTGCTGCAATGATACCGCGAGAACCACGCTCAC | |
| | | CGGCTCCAGATTTATCAGCAATAAACCAGCCAGCCGGAAGGGCCGAGCGCAGAA | |
| | | GTGGTCCTGCAACTTTATCCGCCTCCATCCAGTCTATTAATTGTTGCCGGGAAG | |
| | | CTAGAGTAAGTAGTTCGCCAGTTAATAGTTTGCGCAACGTTGTTGCCATTGCTA | |
| | | CAGGCATCGTGGTGTCACGCTCGTCGTTTGGTATGGCTTCATTCAGCTCCGGTT | |
| | | CCCAACGATCAAGGCGAGTTACATGATCCCCCATGTTGTGCAAAAAAGCGGTTA | |
| | | GCTCCTTCGGTCCTCCGATCGTTGTCAGAAGTAAGTTGGCCGCAGTGTTATCAC | |
| | | TCATGGTTATGGCAGCACTGCATAATTCTCTTACTGTCATGCCATCCGTAAGAT | |
| | | GCTTTTCTGTGACTGGTGAGTACTCAACCAAGTCATTCTGAGAATAGTGTATGC | |
| | | GGCGACCGAGTTGCTCTTGCCCGGCGTCAATACGGGATAATACCGCGCCACATA | |
| | | GCAGAACTTTAAAAGTGCTCATCATTGGAAAACGTTCTTCGGGGCGAAAACTCT | |
| | | CAAGGATCTTACCGCTGTTGAGATCCAGTTCGATATAACCCACTCGTGCACCCA | |
| | | ACTGATCTTCAGCATCTTTTACTTTCACCAGCGTTTCTGGGTGAGCAAAAACAG | |
| | | GAAGGCAAAATGCCGCAAAAAAGGGAATAAGGGCGACACGGAAATGTTGAATAC | |
| | | TCATACTCTTCCTTTTTCAATATTATTGAAGCATTTATCAGGGTTATTGTCTCA | |
| | | TGAGCGGATACATATTTGAATGTATTTAGAAAAATAAACAAATAGGGGTTCCGC | |
| | | G | |
| pEG3057 | RSTx* | ATGAACAAGAAGAACATTTTACCGCAGTTAGGACAACCAGTCATCCGCCTTACT | 596 |
| | TruE* | GCCGGTCAACTGTCAAGCCAACTGGCGGAGCTTTCTGAGGAGGCTCTGGGAGGG | |
| | | GTCGATGCCTCGTACGCGGTGTTCTGGCCGATCTGTAGCTATGACGACTAATAA | |
| pEG3058 | RSTx*- | ATGGCATATCCCAACGATCAACAAGGTAAAGCACTTCCTTTCTTTGCTCGTTTC | 597 |
| | MdnA | TTGTCCGTAAGCAAAGAGGAATCTTCCATCAAGTCTCCTTCCCCTGAGCCTACC | |
| | | TACGGGGGCACCTTTAAATACCCTTCTGACTGGGAAGATTATTAATAA | |
| pEG3059 | RSTx*- | ATGAAAAAAGCTGTCATTGTAGAAAACAAAGGTTGTGCAACATGCTCGATCGGA | 598 |
| | SboA | GCCGCTTGTCTAGTGGACGGTCCTATCCCTGATTTTGAAATTGCCGGTGCAACA | |
| | | GGTCTATTCGGTCTATGGGGATAA | |
| pEG3060 | RSTx* | ATGTGGAAGAAACCTGCTTTTATCGATTTACGTCTCGGTCTGGAAGTGACGCTG | 599 |
| | PqqA | TACATTTCTAACCGTTAATAA | |
| pEG3061 | RST_{N}*-StrA | ATGAGTAAGGAATTAGAAAAAGTTCTTGAATCCAGTTCAATGGCAAAGGGGGAC | 600 |
| | | GGCTGGAAGGTTATGGCTAAAGGTGACGGTTGGGAGTAATAA | |
| pEG3062 | RST_{N}*- | ATGGGTCCGGTTGTTGTGTTCGATTGCATGACGGCCGACTTTCTGAACGACGAT | 601 |
| | BmbC | CCAAATAACGCGGAGTTGTCTGCCTTGGAAATGGAGGAGCTCGAGTCCTGGGGC | |
| | | GCCTGGGACGGAGAGGCTACCAGCTAGTAA | |
| pEG3063 | RST_{N}*- | ATGGATAACAAGGTTGCGAAGAATGTCGAAGTGAAGAAGGGCTCCATCAAGGCG | 602 |
| | TfxA | ACCTTCAAGGCTGCTGTTCTGAAGTCGAAGACGAAGGTCGACATCGGAGGTAGC | |
| | | CGTCAGGGCTGCGTCGCTTAATAA | |
| pEG3064 | RST_{N}*- | ATGTCAGAAGAACAACTCAAGGCATTCATTGCCAAGGTTCAAGCAGACACTTCA | 603 |
| | ProcA1.7 | CTGCAGGAACAGCTCAAAGTAGAAGGTGCTGATGTTGTTGCTATTGCTAAAGCC | |
| | | TCAGGGTTCGCGATTACCACAGAGGACTTAAAAGCACATCAAGCCAACTCACAA | |
| | | AAGAACCTGTCTGATGCTGAGCTGGAAGGTGTGGCTGGGCGAACCATTGGGGGA | |
| | | ACCATTGTGTCGATAACCTGTGAGACTTGCGATCTGCTTGTGGGGAAAATGTGC | |
| | | TGATAA | |
| pEG3065 | RST_{N}*- | ATGGACCTGAATGATCTGCCGATGGATGTTTTTGAACTGGCAGATAGCGGTGTT | 604 |
| | TbtA | GCAGTTGAAAGCCTGACCGCAGGTCATGGTATGACCGAAGTTGGTGCAAGCTGT | |
| | | AATTGCTTTTGTTATATTTGTTGTAGCTGCAGCAGCGCCTAATAA | |
| pEG3067 | RST_{N}*- | ATGGAGCGCGAAATCGTGTGGACAGAAATTGAGGAGTCGGATTTAGCCGCCGTC | 605 |
| | Pgm2 | GTGTCGGCATCTAATGTCAAGGATGGTCCAACCGTTAGCTCAAGTAATGTAAAG | |
| | | GACCGCTAATAA | |
| bEG_S4 | RST_{N} | CACATTTCCCCGAAAAGTGCCACCTGACGTCTAAGAAACCATTATTATCATGAC | 606 |
| | expression | ATTAACCTATAAAAATAGGCGTATCACGAGGCAGAATTTCAGATAAAAAAAATC | |
| | vector | CTTAGCTTTCGCTAAGGATGATTTCTGGAATTCGCGGCCGCTTCTAGAGGGAGA | |
| | | ACGATCGTTGGCTGaatcataaaaaatttatttgctttgtgagcggataacaat | |
| | | [chemical structure] | |
| | | [chemical structure] | |
| | | TGCAGGACTCAGAAGTCAATCAAGAAGCTAAGCCAGAGGTCAAGCCAGAAGTCA | |
| | | AGCCTGAGACTCACATCAATTTAAAGGTGTCCGATGGATCTTCAGAGATCTTCT | |
| | | TCAAGATCAAAAAGACCACTCCTTTAAGAAGGCTGATGGAAGCGTTCGCTAAAA | |
| | | GACAGGGTAAGGAAATGGACTCCTTAAGATTCTTGTACGACGGTATTAGAATTC | |
| | | AAGCTGATCAGGCCCCTGAAGATTTGGACATGGAGGATAACGATATTATTGAGG | |
| | | CTCACCGCGAACAGATTGGAGGTTGCATGTCATATTACGACTCCATTCCCACAA | |
| | | GCGAGAACTTGTACTTTCAAGGGTGCATGAGCAAAGGAGAAGAACTTTTCACTG | |
| | | GAGTTGTCCCAATTCTTGTTGAATTAGATGGTGATGTTAATGGGCACAAATTTT | |
| | | CTGTCCGTGGAGAGGGTGAAGGTGATGCTACAAACGGAAAACTCACCCTTAAAT | |
| | | TTATTTGCACTACTGGAAAACTACCTGTTCCGTGGCCAACACTTGTCACTACTC | |
| | | TGACCTATGGTGTTCAATGCTTTTCCCGTTATCCGGATCACATGAAACGGCATG | |
| | | ACTTTTTCAAGAGTGCCATGCCCGAAGGTTATGTACAGGAACGCACTATATCTT | |
| | | TCAAAGATGACGGGACCTACAAGACGCGTGCTGAAGTCAAGTTTGAAGGTGATA | |
| | | CCCTTGTTAATCGTATCGAGTTAAAGGGTATTGATTTTAAAGAAGATGGAAACA | |
| | | TTCTTGGACACAAACTCGAGTACAACTTTAACTCACACAATGTATACATCACGG | |
| | | CAGACAAACAAAAGAATGGAATCAAAGCTAACTTCAAAATTCGCCACAACGTTG | |
| | | AAGATGGTTCCGTTCAACTAGCAGACCATTATCAACAAAATACTCCAATTGGCG | |
| | | ATGGCCCTGTCCTTTTACCAGACAACCATTACCTGTCGACACAATCTGTCCTTT | |
| | | CGAAAGATCCCAACGAAAAGCGTGACCACATGGTCCTTCTTGAGTTTGTAACTG | |
| | | CTGCTGGGATTACACATGGCATGGATGAGCTCTACAAATAATTCAGCCAAAAAA | |
| | | CTTAAGACCGCCGGTCTTGTCCACTACCTTGCAGTAATGCGGTGGACAGGATCG | |
| | | GCGGTTTTCTTTTCTCTTCTCAACCAATGgcggcgcgccatcgaatggcgcaaa | |
| | | acctttcgcggtatggcatgatagcgcccGGAAGAGAGTCAATTCAGGGTGGTG | |
| | | AATATGAAACCAGTAACGTTATACGATGTCGCAGAGTATGCCGGTGTCTCTTAT | |
| | | CAGACCGTTTCCCGCGTGGTGAACCAGGCCAGCCACGTTTCTGCGAAAACGCGG | |
| | | GAAAAAGTGGAAGCGGCGATGGCGGAGCTGAATTACATTCCCAACCGCGTGGCA | |
| | | CAACAACTGGCGGGCAAACAGTCGTTGCTTATTGGCGTTGCCACCTCCAGTCTG | |
| | | GCCCTGCACGCGCCGTCGCAAATTGTCGCGGCGATTAAATCTCGCGCCGATCAA | |
| | | CTGGGTGCCAGCGTGGTGGTGTCGATGGTAGAACGAAGCGGCGTCGAAGCCTGT | |
| | | AAAGCGGCGGTGCACAATCTTCTCGCGCAACGCGTCAGTGGGCTGATCATTAAC | |
| | | TATCCGCTGGATGACCAGGATGCCATTGCTGTGGAAGCTGCCTGCACTAATGTT | |
| | | CCGGCGTTATTTCTTGATGTCTCTGACCAGACACCCATCAACAGTATTATTTTC | |
| | | TCCCATGAGGACGGTACGCGACTGGGCGTGGAGCATCTGGTCGCATTGGGTCAC | |
| | | CAGCAAATCGCGCTGTTAGCGGGCCCATTAAGTTCTGTCTCGGCGCGTCTGCGT | |
| | | CTGGCTGGCTGGCATAAATATCTCACTCGCAATCAAATTCAGCCGATAGCGGAA | |
| | | CGGGAAGGCGACTGGAGTGCCATGTCCGGTTTTCAACAAACCATGCAAATGCTG | |
| | | AATGAGGGCATCGTTCCCACTGCGATGCTGGTTGCCAACGATCAGATGGCGCTG | |
| | | GGCGCAATGCGCGCCATTACCGAGTCCGGGCTGCGCGTTGGTGCGGATATCTCG | |
| | | GTAGTGGGATACGACGATACCGAAGATAGCTCATGTTATATCCCGCCGTTAACC | |
| | | ACCATCAAACAGGATTTTCGCCTGCTGGGGCAAACCAGCGTGGACCGCTTGCTG | |
| | | CAACTCTCTCAGGGCCAGGCGGTGAAGGGCAATCAGCTGTTGCCAGTCTCACTG | |
| | | GTGAAAAGAAAAACCACCCTGGCGCCCAATACGCAAACCGCCTCTCCCCGCGCG | |
| | | TTGGCCGATTCATTAATGCAGCTGGCACGACAGGTTTCCCGACTGGAAAGCGGG | |
| | | CAGTGATAATTGGTAACGAATCAGACAATTGACGGCTCGAGGGAGTAGCATAGG | |
| | | GTTTGCAGAATCCCTGCTTCGTCCATTTGACAGGCACATTATGCATCGATGATA | |
| | | AGCTGTCAAACATGAGCACGCTTACTAGTAGCGGCCGCTGCAGTCCGGCAAAAA | |
| | | AGGGCAAGGTGTCACCACCCTGCCCTTTTTCTTTAAAACCGAAAAGATTACTTC | |
| | | GCGTTATGCAGGCTTCCTCGCTCACTGACTCGCTGCGCTCGGTCGTTCGGCTGC | |
| | | GGCGAGCGGTATCAGCTCACTCAAAGGCGGTAATGACAGTAAGACGGGTAAGCC | |
| | | TGTTGATGATACCGCTGCCTTACTGGGTGCATTAGCCAGTCTGAATGACCTGTC | |
| | | ACGGGATAATCCGAAGTGGTCAGACTGGAAAATCAGAGGGCAGGAACTGCTGAA | |
| | | CAGCAAAAAGTCAGATAGCACCACATAGCAGACCCGCCATAAAACGCCCTGAGA | |
| | | AGCCCGTGACGGGCTTTTCTTGTATTATGGGTAGTTTCCTTGCATGAATCCATA | |
| | | AAAGGCGCCTGTAGTGCCATTTACCCCCATTCACTGCCAGAGCCGTGAGCGCAG | |
| | | CGAACTGAATGTCACGAAAAAGACAGCGACTCAGGTGCCTGATGGTCGGAGACA | |
| | | AAAGGAATATTCAGCGATTTGCCCGAGCTTGCGAGGGTGCTACTTAAGCCTTTA | |
| | | GGGTTTTAAGGTCTGTTTTGTAGAGGAGCAAACAGCGTTTGCGACATCCTTTTG | |
| | | TAATACTGCGGAACTGACTAAAGTAGTGAGTTATACACAGGGCTGGGATCTATT | |
| | | CTTTTTATCTTTTTTTATTCTTTCTTTATTCTATAAATTATAACCACTTGAATA | |
| | | TAAACAAAAAAAACACACAAAGGTCTAGCGGAATTTACAGAGGGTCTAGCAGAA | |
| | | TTTACAAGTTTTCCAGCAAAGGTCTAGCAGAATTTACAGATACCCACAACTCAA | |
| | | AGGAAAAGGACTAGTAATTATCATTGACTAGCCCATCTCAATTGGTATAGTGAT | |
| | | TAAAATCACCTAGACCAATTGAGATGTATGTCTGAATTAGTTGTTTTCAAAGCA | |
| | | AATGAACTAGCGATTAGTCGCTATGACTTAACGGAGCATGAAACCAAGCTAATT | |
| | | TTATGCTGTGTGGCACTACTCAACCCCACGATTGAAAACCCTACAAGGAAAGAA | |
| | | CGGACGGTATCGTTCACTTATAACCAATACGCTCAGATGATGAACATCAGTAGG | |
| | | GAAAATGCTTATGGTGTATTAGCTAAAGCAACCAGAGAGCTGATGACGAGAACT | |
| | | GTGGAAATCAGGAATCCTTTGGTTAAAGGCTTTTGGATTTTCCAGTGGACAAAC | |
| | | TATGCCAAGTTCTCAAGCGAAAAATTAGAATTAGTTTTTAGTGAAGAGATATTG | |
| | | CCTTATCTTTTCCAGTTAAAAAAATTCATAAAATATAATCTGGAACATGTTAAG | |
| | | TCTTTTGAAAACAAATACTCTATGAGGATTTATGAGTGGTTATTAAAAGAACTA | |
| | | ACACAAAAGAAAACTCACAAGGCAAATATAGAGATTAGCCTTGATGAATTTAAG | |
| | | TTCATGTTAATGCTTGAAAATAACTACCATGAGTTTAAAAGGCTTAACCAATGG | |
| | | GTTTTGAAACCAATAAGTAAAGATTTAAACACTTACAGCAATATGAAATTGGTG | |
| | | GTTGATAAGCGAGGCCGCCCGACTGATACGTTGATTTTCCAAGTTGAACTAGAT | |
| | | AGACAAATGGATCTCGTAACCGAACTTGAGAACAACCAGATAAAAATGAATGGT | |
| | | GACAAAATACCAACAACCATTACATCAGATTCCTACCTACATAACGGACTAAGA | |
| | | AAAACACTACACGATGCTTTAACTGCAAAAATTCAGCTCACCAGTTTTGAGGCA | |
| | | AAATTTTTGAGTGACATGCAAAGTAAGTATGATCTCAATGGTTCGTTCTCATGG | |
| | | CTCACGCAAAAACAACGAACCACACTAGAGAACATACTGGCTAAATACGGAAGG | |
| | | ATCTGAGGTTCTTATGGCTCTTGTATCTATCAGTGAAGCATCAAGACTAACAAA | |
| | | CAAAAGTAGAACAACTGTTCACCGTTACATATCAAAGGGAAAACTGTCCATATG | |
| | | CACAGATGAAAACGGTGTAAAAAAGATAGATACATCAGAGCTTTTACGAGTTTT | |
| | | TGGTGCATTCAAAGCTGTTCACCATGAACAGATCGACAATGTAACAGATGAACA | |
| | | GCATGTAACACCTAATAGAACAGGTGAAACCAGTAAAACAAAGCAACTAGAACA | |
| | | TGAAATTGAACACCTGAGACAACTTGTTACAGCTCAACAGTCACACATAGACAG | |
| | | CCTGAAACAGGCGATGCTGCTTATCGAATCAAAGCTGCCGACAACACGGGAGCC | |
| | | AGTGACGCCTCCCGTGGGGAAAAAATCATGGCAATTCTGGAAGAAATAGCGCTT | |
| | | TCAGCCGGCAAACCGGCTGAAGCCGGATCTGCGATTCTGATAACAAACTAGCAA | |
| | | CACCAGAACAGCCCGTTTGCGGGCAGCAAAACCCGTACCGATTATCAAAAAGGA | |
| | | TCTTCACCTAGATCCTTTTAAATTAAAAATGAAGTTTTAAATCAATCTAAAGTA | |
| | | TATATGAGTAAACTTGGTCTGACAGTTACCAATGCTTAATCAGTGAGGCACCTA | |
| | | TCTCAGCGATCTGTCTATTTCGTTCATCCATAGTTGCCTGACTCCCCGTCGTGT | |
| | | AGATAACTACGATACGGGAGGGCTTACCATCTGGCCCCAGTGCTGCAATGATAC | |
| | | CGCGAGAACCACGCTCACCGGCTCCAGATTTATCAGCAATAAACCAGCCAGCCG | |
| | | GAAGGGCCGAGCGCAGAAGTGGTCCTGCAACTTTATCCGCCTCCATCCAGTCTA | |
| | | TTAATTGTTGCCGGGAAGCTAGAGTAAGTAGTTCGCCAGTTAATAGTTTGCGCA | |
| | | ACGTTGTTGCCATTGCTACAGGCATCGTGGTGTCACGCTCGTCGTTTGGTATGG | |
| | | CTTCATTCAGCTCCGGTTCCCAACGATCAAGGCGAGTTACATGATCCCCCATGT | |
| | | TGTGCAAAAAAGCGGTTAGCTCCTTCGGTCCTCCGATCGTTGTCAGAAGTAAGT | |
| | | TGGCCGCAGTGTTATCACTCATGGTTATGGCAGCACTGCATAATTCTCTTACTG | |
| | | TCATGCCATCCGTAAGATGCTTTTCTGTGACTGGTGAGTACTCAACCAAGTCAT | |
| | | TCTGAGAATAGTGTATGCGGCGACCGAGTTGCTCTTGCCCGGCGTCAATACGGG | |
| | | ATAATACCGCGCCACATAGCAGAACTTTAAAAGTGCTCATCATTGGAAAACGTT | |
| | | CTTCGGGGCGAAAACTCTCAAGGATCTTACCGCTGTTGAGATCCAGTTCGATAT | |
| | | AACCCACTCGTGCACCCAACTGATCTTCAGCATCTTTTACTTTCACCAGCGTTT | |
| | | CTGGGTGAGCAAAAACAGGAAGGCAAAATGCCGCAAAAAAGGGAATAAGGGCGA | |
| | | CACGGAAATGTTGAATACTCATACTCTTCCTTTTTCAATATTATTGAAGCATTT | |
| | | ATCAGGGTTATTGTCTCATGAGCGGATACATATTTGAATGTATTTAGAAAAATA | |
| | | AACAAATAGGGGTTCCGCG | |
| pEG3121 | MdnA* | ATGGCACTTCCTTTCTTTGCTCGTTTCTTGTCCGTAAGCAAAGAGGAATCTTCC | 607 |
| | | ATCAAGTCTCCTTCCCCTGAGCCTACCTACGGGGGCACCTTTAAATACCCTTCT | |
| | | GACTGGGAAGATTATTAATAA | |
| pEG3128 | ProcA* | ATGTCAGAAGAACAACTCAAGGCATTCATTGCCAAGGTTCAAGCAGACACTTCA | 608 |
| | | CTGCAGGAACAGCTCAAAGTAGAAGGTGCTGATGTTGTTGCTATTGCTAAAGCC | |
| | | TCAGGGTTCGCGATTACCACAGAGGACCTCAATTCGCATCGCCAAAATCTGTCT | |
| | | GATGATGAGCTGGAGGGAGTCGCGGGAGGCTTTTTCTGCGTACAGGGTACGGCC | |
| | | AACCGTTTCACTATCAACGTTTGCTGATAA | |
| pEG3132 | PaaP | ATGATTAAATTTTCTACATTGTCTCAGCGCATCAGCGCCATCACGGAAGAAAAC | 609 |
| | | GCCATGTACACTAAGGGTCAAGTGATCGTATTGAGCTGATAA | |
| pEG3248 | SboA | ATGAAAAAAGCTGTCATTGTAGAAAACAAAGGTTGTGCAACATGCTCGATCGGA | 610 |
| | | GCCGCTTGTCTAGTGGACGGTCCTATCCCTGATTTTGAAATTGCCGGTGCAACA | |
| | | GGTCTATTCGGTCTATGGGGATAA | |
| bEG_S5 | RSTn | CACATTTCCCCGAAAAGTGCCACCTGACGTCTAAGAAACCATTATTATCATGAC | 611 |
| | expression | ATTAACCTATAAAAATAGGCGTATCACGAGGCAGAATTTCAGATAAAAAAAATC | |
| | vector (w/ | CTTAGCTTTCGCTAAGGATGATTTCTGGAATTCGCGGCCGCTTCTAGAGGGAGG | |
| | flanking | GTCTCAGTGCAACGATCGTTGGCTGaatcataaaaaatttatttgctttgtgag | |
| | restriction | [chemical structure] | |
| | sites) | [chemical structure] | |
| | | TCACGGGTCCCTGCAGGACTCAGAAGTCAATCAAGAAGCTAAGCCAGAGGTCAA | |
| | | GCCAGAAGTCAAGCCTGAGACTCACATCAATTTAAAGGTGTCCGATGGATCTTC | |
| | | AGAGATCTTCTTCAAGATCAAAAAGACCACTCCTTTAAGAAGGCTGATGGAAGC | |
| | | GTTCGCTAAAAGACAGGGTAAGGAAATGGACTCCTTAAGATTCTTGTACGACGG | |
| | | TATTAGAATTCAAGCTGATCAGGCCCCTGAAGATTTGGACATGGAGGATAACGA | |
| | | TATTATTGAGGCTCACCGCGAACAGATTGGAGGTTGCATGTCATATTACGACTC | |
| | | CATTCCCACAAGCGAGAACTTGTACTTTCAAGGGTGCATGAGCAAAGGAGAAGA | |
| | | ACTTTTCACTGGAGTTGTCCCAATTCTTGTTGAATTAGATGGTGATGTTAATGG | |
| | | GCACAAATTTTCTGTCCGTGGAGAGGGTGAAGGTGATGCTACAAACGGAAAACT | |
| | | CACCCTTAAATTTATTTGCACTACTGGAAAACTACCTGTTCCGTGGCCAACACT | |
| | | TGTCACTACTCTGACCTATGGTGTTCAATGCTTTTCCCGTTATCCGGATCACAT | |
| | | GAAACGGCATGACTTTTTCAAGAGTGCCATGCCCGAAGGTTATGTACAGGAACG | |
| | | CACTATATCTTTCAAAGATGACGGGACCTACAAGACGCGTGCTGAAGTCAAGTT | |
| | | TGAAGGTGATACCCTTGTTAATCGTATCGAGTTAAAGGGTATTGATTTTAAAGA | |
| | | AGATGGAAACATTCTTGGACACAAACTCGAGTACAACTTTAACTCACACAATGT | |
| | | ATACATCACGGCAGACAAACAAAAGAATGGAATCAAAGCTAACTTCAAAATTCG | |
| | | CCACAACGTTGAAGATGGTTCCGTTCAACTAGCAGACCATTATCAACAAAATAC | |
| | | TCCAATTGGCGATGGCCCTGTCCTTTTACCAGACAACCATTACCTGTCGACACA | |
| | | ATCTGTCCTTTCGAAAGATCCCAACGAAAAGCGTGACCACATGGTCCTTCTTGA | |
| | | GTTTGTAACTGCTGCTGGGATTACACATGGCATGGATGAGCTCTACAAATAATT | |
| | | CAGCCAAAAAACTTAAGACCGCCGGTCTTGTCCACTACCTTGCAGTAATGCGGT | |
| | | GGACAGGATCGGCGGTTTTCTTTTCTCTTCTCAACAAGTGAGACCATGGgcggc | |
| | | [chemical structure] | |
| | | [chemical structure] | |
| | | AGTATGCCGGTGTCTCTTATCAGACCGTTTCCCGCGTGGTGAACCAGGCCAGCC | |
| | | ACGTTTCTGCGAAAACGCGGGAAAAAGTGGAAGCGGCGATGGCGGAGCTGAATT | |
| | | ACATTCCCAACCGCGTGGCACAACAACTGGCGGGCAAACAGTCGTTGCTTATTG | |
| | | GCGTTGCCACCTCCAGTCTGGCCCTGCACGCGCCGTCGCAAATTGTCGCGGCGA | |
| | | TTAAATCTCGCGCCGATCAACTGGGTGCCAGCGTGGTGGTGTCGATGGTAGAAC | |
| | | GAAGCGGCGTCGAAGCCTGTAAAGCGGCGGTGCACAATCTTCTCGCGCAACGCG | |
| | | TCAGTGGGCTGATCATTAACTATCCGCTGGATGACCAGGATGCCATTGCTGTGG | |
| | | AAGCTGCCTGCACTAATGTTCCGGCGTTATTTCTTGATGTCTCTGACCAGACAC | |
| | | CCATCAACAGTATTATTTTCTCCCATGAGGACGGTACGCGACTGGGCGTGGAGC | |
| | | ATCTGGTCGCATTGGGTCACCAGCAAATCGCGCTGTTAGCGGGCCCATTAAGTT | |
| | | CTGTCTCGGCGCGTCTGCGTCTGGCTGGCTGGCATAAATATCTCACTCGCAATC | |
| | | AAATTCAGCCGATAGCGGAACGGGAAGGCGACTGGAGTGCCATGTCCGGTTTTC | |
| | | AACAAACCATGCAAATGCTGAATGAGGGCATCGTTCCCACTGCGATGCTGGTTG | |
| | | CCAACGATCAGATGGCGCTGGGCGCAATGCGCGCCATTACCGAGTCCGGGCTGC | |
| | | GCGTTGGTGCGGATATCTCGGTAGTGGGATACGACGATACCGAAGATAGCTCAT | |
| | | GTTATATCCCGCCGTTAACCACCATCAAACAGGATTTTCGCCTGCTGGGGCAAA | |
| | | CCAGCGTGGACCGCTTGCTGCAACTCTCTCAGGGCCAGGCGGTGAAGGGCAATC | |
| | | AGCTGTTGCCAGTCTCACTGGTGAAAAGAAAAACCACCCTGGCGCCCAATACGC | |
| | | AAACCGCCTCTCCCCGCGCGTTGGCCGATTCATTAATGCAGCTGGCACGACAGG | |
| | | TTTCCCGACTGGAAAGCGGGCAGTGATAATTGGTAACGAATCAGACAATTGACG | |
| | | GCTCGAGGGAGTAGCATAGGGTTTGCAGAATCCCTGCTTCGTCCATTTGACAGG | |
| | | CACATTATGCATCGATGATAAGCTGTCAAACATGAGCACGCTTACTAGTAGCGG | |
| | | CCGCTGCAGTCCGGCAAAAAAGGGCAAGGTGTCACCACCCTGCCCTTTTTCTTT | |
| | | AAAACCGAAAAGATTACTTCGCGTTATGCAGGCTTCCTCGCTCACTGACTCGCT | |
| | | GCGCTCGGTCGTTCGGCTGCGGCGAGCGGTATCAGCTCACTCAAAGGCGGTAAT | |
| | | GACAGTAAGACGGGTAAGCCTGTTGATGATACCGCTGCCTTACTGGGTGCATTA | |
| | | GCCAGTCTGAATGACCTGTCACGGGATAATCCGAAGTGGTCAGACTGGAAAATC | |
| | | AGAGGGCAGGAACTGCTGAACAGCAAAAAGTCAGATAGCACCACATAGCAGACC | |
| | | CGCCATAAAACGCCCTGAGAAGCCCGTGACGGGCTTTTCTTGTATTATGGGTAG | |
| | | TTTCCTTGCATGAATCCATAAAAGGCGCCTGTAGTGCCATTTACCCCCATTCAC | |
| | | TGCCAGAGCCGTGAGCGCAGCGAACTGAATGTCACGAAAAAGACAGCGACTCAG | |
| | | GTGCCTGATGGTCGGAGACAAAAGGAATATTCAGCGATTTGCCCGAGCTTGCGA | |
| | | GGGTGCTACTTAAGCCTTTAGGGTTTTAAGGTCTGTTTTGTAGAGGAGCAAACA | |
| | | GCGTTTGCGACATCCTTTTGTAATACTGCGGAACTGACTAAAGTAGTGAGTTAT | |
| | | ACACAGGGCTGGGATCTATTCTTTTTATCTTTTTTTATTCTTTCTTTATTCTAT | |
| | | AAATTATAACCACTTGAATATAAACAAAAAAAACACACAAAGGTCTAGCGGAAT | |
| | | TTACAGAGGGTCTAGCAGAATTTACAAGTTTTCCAGCAAAGGTCTAGCAGAATT | |
| | | TACAGATACCCACAACTCAAAGGAAAAGGACTAGTAATTATCATTGACTAGCCC | |
| | | ATCTCAATTGGTATAGTGATTAAAATCACCTAGACCAATTGAGATGTATGTCTG | |
| | | AATTAGTTGTTTTCAAAGCAAATGAACTAGCGATTAGTCGCTATGACTTAACGG | |
| | | AGCATGAAACCAAGCTAATTTTATGCTGTGTGGCACTACTCAACCCCACGATTG | |
| | | AAAACCCTACAAGGAAAGAACGGACGGTATCGTTCACTTATAACCAATACGCTC | |
| | | AGATGATGAACATCAGTAGGGAAAATGCTTATGGTGTATTAGCTAAAGCAACCA | |
| | | GAGAGCTGATGACGAGAACTGTGGAAATCAGGAATCCTTTGGTTAAAGGCTTTT | |
| | | GGATTTTCCAGTGGACAAACTATGCCAAGTTCTCAAGCGAAAAATTAGAATTAG | |
| | | TTTTTAGTGAAGAGATATTGCCTTATCTTTTCCAGTTAAAAAAATTCATAAAAT | |
| | | ATAATCTGGAACATGTTAAGTCTTTTGAAAACAAATACTCTATGAGGATTTATG | |
| | | AGTGGTTATTAAAAGAACTAACACAAAAGAAAACTCACAAGGCAAATATAGAGA | |
| | | TTAGCCTTGATGAATTTAAGTTCATGTTAATGCTTGAAAATAACTACCATGAGT | |
| | | TTAAAAGGCTTAACCAATGGGTTTTGAAACCAATAAGTAAAGATTTAAACACTT | |
| | | ACAGCAATATGAAATTGGTGGTTGATAAGCGAGGCCGCCCGACTGATACGTTGA | |
| | | TTTTCCAAGTTGAACTAGATAGACAAATGGATCTCGTAACCGAACTTGAGAACA | |
| | | ACCAGATAAAAATGAATGGTGACAAAATACCAACAACCATTACATCAGATTCCT | |
| | | ACCTACATAACGGACTAAGAAAAACACTACACGATGCTTTAACTGCAAAAATTC | |
| | | AGCTCACCAGTTTTGAGGCAAAATTTTTGAGTGACATGCAAAGTAAGTATGATC | |
| | | TCAATGGTTCGTTCTCATGGCTCACGCAAAAACAACGAACCACACTAGAGAACA | |
| | | TACTGGCTAAATACGGAAGGATCTGAGGTTCTTATGGCTCTTGTATCTATCAGT | |
| | | GAAGCATCAAGACTAACAAACAAAAGTAGAACAACTGTTCACCGTTACATATCA | |
| | | AAGGGAAAACTGTCCATATGCACAGATGAAAACGGTGTAAAAAAGATAGATACA | |
| | | TCAGAGCTTTTACGAGTTTTTGGTGCATTCAAAGCTGTTCACCATGAACAGATC | |
| | | GACAATGTAACAGATGAACAGCATGTAACACCTAATAGAACAGGTGAAACCAGT | |
| | | AAAACAAAGCAACTAGAACATGAAATTGAACACCTGAGACAACTTGTTACAGCT | |
| | | CAACAGTCACACATAGACAGCCTGAAACAGGCGATGCTGCTTATCGAATCAAAG | |
| | | CTGCCGACAACACGGGAGCCAGTGACGCCTCCCGTGGGGAAAAAATCATGGCAA | |
| | | TTCTGGAAGAAATAGCGCTTTCAGCCGGCAAACCGGCTGAAGCCGGATCTGCGA | |
| | | TTCTGATAACAAACTAGCAACACCAGAACAGCCCGTTTGCGGGCAGCAAAACCC | |
| | | GTACCGATTATCAAAAAGGATCTTCACCTAGATCCTTTTAAATTAAAAATGAAG | |
| | | TTTTAAATCAATCTAAAGTATATATGAGTAAACTTGGTCTGACAGTTACCAATG | |
| | | CTTAATCAGTGAGGCACCTATCTCAGCGATCTGTCTATTTCGTTCATCCATAGT | |
| | | TGCCTGACTCCCCGTCGTGTAGATAACTACGATACGGGAGGGCTTACCATCTGG | |
| | | CCCCAGTGCTGCAATGATACCGCGAGAACCACGCTCACCGGCTCCAGATTTATC | |
| | | AGCAATAAACCAGCCAGCCGGAAGGGCCGAGCGCAGAAGTGGTCCTGCAACTTT | |
| | | ATCCGCCTCCATCCAGTCTATTAATTGTTGCCGGGAAGCTAGAGTAAGTAGTTC | |
| | | GCCAGTTAATAGTTTGCGCAACGTTGTTGCCATTGCTACAGGCATCGTGGTGTC | |
| | | ACGCTCGTCGTTTGGTATGGCTTCATTCAGCTCCGGTTCCCAACGATCAAGGCG | |
| | | AGTTACATGATCCCCCATGTTGTGCAAAAAAGCGGTTAGCTCCTTCGGTCCTCC | |
| | | GATCGTTGTCAGAAGTAAGTTGGCCGCAGTGTTATCACTCATGGTTATGGCAGC | |
| | | ACTGCATAATTCTCTTACTGTCATGCCATCCGTAAGATGCTTTTCTGTGACTGG | |
| | | TGAGTACTCAACCAAGTCATTCTGAGAATAGTGTATGCGGCGACCGAGTTGCTC | |
| | | TTGCCCGGCGTCAATACGGGATAATACCGCGCCACATAGCAGAACTTTAAAAGT | |
| | | GCTCATCATTGGAAAACGTTCTTCGGGGCGAAAACTCTCAAGGATCTTACCGCT | |
| | | GTTGAGATCCAGTTCGATATAACCCACTCGTGCACCCAACTGATCTTCAGCATC | |
| | | TTTTACTTTCACCAGCGTTTCTGGGTGAGCAAAAACAGGAAGGCAAAATGCCGC | |
| | | AAAAAAGGGAATAAGGGCGACACGGAAATGTTGAATACTCATACTCTTCCTTTT | |
| | | TCAATATTATTGAAGCATTTATCAGGGTTATTGTCTCATGAGCGGATACATATT | |
| | | TGAATGTATTTAGAAAAATAAACAAATAGGGGTTCCGCG | |
| pEG2192 | PapoA | AGCAAGAAAGAATGGCAAGAGCCCACGATCGAAGTGCTCGATATTAATCAGACT | 612 |
| | | ATGGCGGGTAAGGGCTGGAAACAGATAGACTGGGTGAGCGACCATGATGCTGAC | |
| | | TTACACAATCCGTCTTAATAA | |
| pEG2194 | BamA | CTGAAAATCCGCAAGGTGAAAATTGTCAGAGCGCAGAACGGCCACTACACGAAC | 613 |
| | | TAATAA | |
| pEG2195 | EpiA | GAAGCAGTTAAAGAGAAGAACGATCTGTTCAACCTGGATGTTAAAGTCAACGCA | 614 |
| | | AAAGAAAGTAACGATAGTGGCGCAGAACCACGCATAGCGTCGAAATTTATTTGC | |
| | | ACACCAGGCTGCGCGAAAACGGGTTCGTTTAACAGCTATTGTTGTTAATAA | |
| pEG2199 | HalA1 | ACGAACTTGCTGAAAGAATGGAAAATGCCCCTGGAACGTACGCATAATAACTCC | 615 |
| | | AACCCGGCGGGAGACATTTTTCAGGAACTGGAAGATCAAGACATACTCGCCGGT | |
| | | GTGAATGGAGCAGAAAACTTATACTTTCAGGGTTGTGCGTGGTATAACATTAGC | |
| | | TGCCGTCTGGGCAACAAAGGAGCCTACTGCACCCTTACAGTTGAGTGCATGCCC | |
| | | TCCTGTAACTGATAA | |
| pEG2200 | HalA2 | GTGAATTCCAAAGACCTGAGAAATCCAGAATTTCGCAAAGCTCAGGGTCTGCAG | 616 |
| | | TTTGTAGATGAAGTTAATGAGAAGGAACTCTCGAGTTTAGCCGGCAGCGAGAAT | |
| | | CTTTACTTTCAAGGCACGACGTGGCCATGTGCGACCGTCGGCGTTTCAGTTGCC | |
| | | TTGTGCCCGACGACCAAATGCACTTCACAGTGCTGATAA | |
| pEG2312 | PapA_tev | TTGAAACAGATCAATGTGATTGCTGGCGTAAAAGAGCCTATTCGCGCCTATGAG | 617 |
| | | AACTTGTATTTCCAGGGTTGTTCGGCTAATGACGCATGCTATTTTTGCGACACG | |
| | | CGTGACAACTGCAAAGCCTGTGATGCCAGTGATTTTTGTATCAAAAGTGATACG | |
| pEG2571 | TruE_tev | AACAAGAAGAACATTTTACCGCAGTTAGGACAACCAGTCATCCGCCTTACTGCC | 618 |
| | | GGTCAACTGTCAAGCCAACTGGCGGAGCTTTCTGAGGAGGCTCTGGGAGAGAAC | |
| | | TTGTATTTCCAGGGTGTCGATGCCTCGACCTTGCCGGTTCCGACGTTGTGTAGC | |
| | | TATGACGGGGTGGACGCTAGCACAGTCCCTACACTTTGTAGTTACGATGAC | |
| pEG2575 | PsnA2_tev | ATGAGCAAAAATGAGAACAACAAGAAACAGCTGCGCGATCTTTTCATTGAAGAT | 619 |
| | | CTGGGCAAAGTTACTGGCGAGAACTTGTATTTCCAGGGTAAAGGTGGCCCGTAT | |
| | | ACCACCTTAGCCATTGGCGAAGAAGATCCGATTACCACTTTGGCTATCGGAGAA | |
| | | GAGGACCCTGATCCAACGACACTTGCCTTAGGTGAAGAGGACCCAACTACGCTT | |
| | | GCAATCGGCGAAGAA | |
| pEG3157 | MibA | ATGCCAGCCGATATTCTGGAGACTCGTACCAGCGAAACGGAGGACTTACTGGAT | 620 |
| | | CTTGACCTGAGCATCGGTGTAGAAGAAATCACCGCAGGCCCGGCAGTGACTTCT | |
| | | TGGTCACTGTGCACCCCTGGATGCACGAGTCCGGGCGGTGGCTCCAATTGTTCG | |
| | | TTCTGTTGCTAATAA | |
| pEG3161 | PlpA1 | ATGAGCATTGAGAATGCCAAGAGCTTTTATGAACGCGTCAGTACAGATAAGCAG | 621 |
| | | TTCCGCACTCAACTGGAAAATACGGCCAGTGCTGAAGAACGGCAGAAAATCATT | |
| | | CAGGCAGCGGGCTTTGAGTTCACCAATCAGGAGTGGGAAATTGCAAAAGAACAG | |
| | | ATTCTTGCGACAAGTGAAAGTAATAACGGTGAACTGTCCGAGGCCGAACTGACC | |
| | | GCCGTCAGCGGTGGGGTTGACTTAAGCATTTTCGAGCTGCTGGACGAAGAACCT | |
| | | TTATTCCCGATTCGTCCTTTGTACGGCCTGCCTATTTAATAA | |
| pEG3162 | PlpA2 | ATGTCTATTGAGAGTGCAAAGGCTTTCTACCAGCGTATGACGGATGACGCATCT | 622 |
| | | TTTCGTACCCCTTTTGAAGCGGAACTGTCGAAAGAGGAGCGCCAACAATTAATC | |
| | | AAAGATAGCGGATATGACTTTACTGCAGAAGAATGGCAACAGGCTATGACCGAG | |
| | | ATCCAGGCGGCACGCTCAAACGAGGAACTGAATGAGGAAGAACTCGAGGCAATT | |
| | | GCCGGGGGCGCTGTGGCCGCAATGTATGGTGTGGTTTTCCCATGGGACAACGAG | |
| | | TTCCCGTGGCCCCGCTGGGGCGGTTAATAA | |
| pEG3165 | PbtA | ATGAACCTGAACGATTTACCTATGGACGTCTTTGAAATGGCAGACAGCGGTATG | 623 |
| | | GAGGTGGAAAGCCTCACGGCTGGCCATGGCATGCCAGAAGTTGGAGCTAGTTGC | |
| | | AACTGTGTGTGCGGGTTTTGCTGCAGCTGCAGTCCGAGCGCGTAATAA | |
| pEG3172 | LtnA1 | ATGAATAAAAACGAAATCGAAACCCAGCCAGTTACGTGGCTGGAGGAAGTTTCT | 624 |
| | | GATCAGAATTTTGATGAGGATGTCTTTGGTGCGTGTAGCACAAACACCTTCTCG | |
| | | CTGAGCGATTACTGGGGTAACAACGGTGCTTGGTGTACACTCACGCACGAATGT | |
| | | ATGGCATGGTGCAAGTAATAA | |
| pEG3173 | LtnA2 | ATGAAGGAAAAGAATATGAAGAAAAACGACACCATCGAACTTCAGCTTGGAAAA | 625 |
| | | TACCTGGAAGATGATATGATCGAACTGGCTGAAGGGGATGAGTCCCATGGGGGT | |
| | | ACTACCCCGGCTACCCCTGCGATTTCTATCCTCAGCGCGTATATCAGCACCAAT | |
| | | ACCTGCCCGACAACTAAGTGTACACGCGCGTGCTAATAA | |
| pEG3174 | CrnA1 | ATGTCCGAACTGAGTATGGAGAAAGTGGTCGGCGAAACATTTGAGGATCTGAGC | 626 |
| | | ATCGCGGAAATGACGATGGTGCAGGGCAGCGGCGACATTAACGGCGAATTTACT | |
| | | ACCTCGCCGGCATGTGTTTATTCCGTTATGGTTGTATCGAAAGCAAGCAGCGCT | |
| | | AAATGTGCGGCCGGTGCATCGGCAGTCTCGGGAGCCATTCTGAGTGCGATTCGT | |
| | | TGCTAATAA | |
| pEG3175 | CrnA2 | ATGAGCGAATCCAACATGAAGAAGGTTGTTGGCGAAACCTTCGAAGATCTGAGC | 627 |
| | | ATCGCAGAAATGACGAAAGTTCAGGGCTCAGGGGACGTGATGCCGGAATCTACC | |
| | | CCAATTTGTGCCGGCTTCGCAACCTTGATGAGTTCTATCGGTCTTGTTAAAACC | |
| | | ATCAAAGGCAATGTCAAAAGTTTCTCCGTCTTAATTTAATAA | |
| pEG3176 | BsjA2 | ATGACCAATGAAGAGATCATTGTCGCGTGGAAAAACCCTAAAGTCCGTGGCAAA | 628 |
| | | AATATGCCAAGTCACCCGAGCGGCGTGGGATTCCAAGAGCTTTCCATCAACGAG | |
| | | ATGGCCCAAGTGACCGGCGGAGCAGTAGAACAGCGTGCAACACCAACCCTGGCA | |
| | | ACCCCGCTGACCCCGCATACCCCGTACGCAACCTATGTGGTTAGCGGAGGCGTG | |
| | | GTTAGCGCGATTTCTGGTATCTTCAGCAACAATAAAACGTGTCTGGGCTAATAA | |
| pEG3177 | BsjA3 | ATGACCAATGAGGAAATTATCGTTGCGTGGAAAAACCCGAAGGTGCGCGGCAAA | 629 |
| | | AACATGCCTTCCCATCCGTCCGGTGTGGGCTTCCAGGAATTATCTATTAATGAA | |
| | | ATGGCACAGGTGACTGGTGGCGCGGTTGAACAGCGCGCGACGCCGGCAACCCCA | |
| | | GCAACACCATGGCTGATTAAAGCGTCTTATGTGGTGAGTGGGGCGGGAGTTTCT | |
| | | TTTGTCGCAAGCTATATCACTGTAAACTAATAA | |
| pEG3178 | CinA | ATGACGGCGAGTATTCTTCAGTCTGTCGTTGATGCGGACTTTCGTGCGGCCCTG | 630 |
| | | ATTGAAAACCCAGCCGCATTCGGCGCGAGCACCGCAGTTTTGCCGACCCCAGTC | |
| | | GAACAGCAGGATCAGGCATCACTGGATTTTTGGACAAAAGATATTGCTGCCACT | |
| | | GAGGCGTTTGCTTGCAAACAGTCTTGCTCATTTGGGCCGTTCACCTTTGTGTGC | |
| | | GACGGGAATACCAAATAATAA | |
| pEG3180 | LasA | ATGGACAAACGTGTGCGTTACGAAAAACCGAGCCTGGTGAAAGAGGGTACGTTT | 631 |
| | | CGCAAAACTACCGCTGGCCTGCGGCGTCTGTTCGCTGACCAGCTGGTTGGCCGC | |
| | | CGTAACATTTAATAA | |
| pEG3181 | AlbsA | ATGGATTCACTGCTGTCAACAGAAACCGTCATTAGTGATGACGAACTGCTTCCG | 632 |
| | | ATTGAAGTTGGTGGTACCGCGGAATTGACAGAGGGGCAGGGCGGCGGTCAGTCC | |
| | | GAGGATAAACGTCGCGCTTATAACTGCTAATAA | |
| pEG3182 | McbA | ATGGAATTAAAAGCGAGTGAATTTGGTGTAGTTTTGTCCGTTGATGCTCTTAAA | 633 |
| | | TTATCACGCCAGTCTCCATTAGGTGTTGGCATTGGTGGTGGTGGCGGCGGCGGC | |
| | | GGCGGCGGCGGTAGCTGCGGTGGTCAAGGTGGCGGTTGTGGTGGTTGCAGCAAC | |
| | | GGTTGTAGTGGTGGAAACGGTGGCAGCGGCGGAAGTGGTTCACATATCTAATAA | |
| pEG3194 | PsnA2 | ATGAGCAAAAATGAGAACAACAAGAAACAGCTGCGCGATCTTTTCATTGAAGAT | 634 |
| | | CTGGGCAAAGTTACTGGCGGTAAAGGTGGCCCGTATACCACCTTAGCCATTGGC | |
| | | GAAGAAGATCCGATTACCACTTTGGCTATCGGAGAAGAGGACCCTGATCCAACG | |
| | | ACACTTGCCTTAGGTGAAGAGGACCCAACTACGCTTGCAATCGGCGAAGAATAA | |
| | | TAA | |
| pEG3197 | AMdnA | ATGCCGGAAAATCGGCAGGAAGATCTCAACGCTCAGGCTGTACCATTCTTCGCG | 635 |
| | | CGTTTCTTGGAGGGTCAAAACTGCGAGGACCTTACTGATGAGGAATCGGAGGCG | |
| | | GTTAGCGGTGGAAAACGCGGCCAAACCCGTAAATATCCAAGCGACTGCGAAGAT | |
| | | GGGAATGGCGTGACCGGTAAACTGCGCGATGAAGATATTGCAGTGACCTTGAAG | |
| | | TACCCATCCGACAATGAAGATAATGGCGGCGGTGAAATTGTGACTCTGAAGTTT | |
| | | CCAAGTGATGATGATGATCAACCAGTAGGCTAATAA | |
| pEG3283 | PapA | ATGTTGAAACAGATCAATGTGATTGCTGGCGTAAAAGAGCCTATTCGCGCCTAT | 636 |
| | | GGTTGTTCGGCTAATGACGCATGCTATTTTTGCGACACGCGTGACAACTGCAAA | |
| | | GCCTGTGATGCCAGTGATTTTTGTATCAAAAGTGATACGTAATAA | |
| pEG3286 | PcpA | ATGTCGAGTAATATCCTCGAAAAAGTTAAGGAGTTTTTCGTCCGGCTGGTGAAG | 637 |
| | | GATGATGCGTTTCAAAGCCAGCTGCAGAACAACAGTATTGATGAAGTTCGAAAT | |
| | | ATCCTGCAGGAGGCCGGGTACATATTCAGCAAAGAAGAATTCGAAACCGCAACC | |
| | | ATTGAATTGCTGGATTTGAAGGAACGCGATGAATTCCACGAGCTGACAGAAGAG | |
| | | GAGCTTGTCACCGCTGTTGGCGGTGTTACGGGCGGGAGTGGTATATATGGCCCG | |
| | | ATTCAAGCTATGTACGGTGCCGTCGTAGGTGATCCAAAACCGGGTAAGGACTGG | |
| | | GGGTGGCGCTTTCCGAGCCCGCTGCCAAAACCGAGTCCGATTCCGAGTCCGTGG | |
| | | AAACCCCCGGTTGATGTCCAGCCTATGTATGGTGTGGTAGTGTCAAACGATAGT | |
| | | TAATAA | |
| pEG3563 | PadeA | AAAAAGCAATATAGCAAACCTAGCCTGGAGGTTCTGGACGTCCACCAGACCATG | 638 |
| | | GCTGGCCCGGGCACTAGTACGCCAGACGCGTTTCAGCCAGATCCAGATGAAGAT | |
| | | GTTCACTATGATTCGTAATAA | |
| pEG3564 | ThcoA | CGCAAGAAAGAATGGCAGACACCAGAACTGGAAGTACTCGATGTACGCCTCACC | 639 |
| | | GCAGCGGGCCCGGGTAAAGCTAAACCGGATGCTGTGCAGCCAGACGAAGATGAA | |
| | | ATAGTGCACTACTCATAATAA | |
| pEG3565 | StspA | AAGAAATTCTATGAAGCGCCAGCTCTCATCGAACGTGGCGCCTTTGCGGCTGCT | 640 |
| | | ACAGCGGGGTTTGGACGTCTGCTGGCGGATCAGCTGGTGGGACGCCTGATTCCG | |
| | | TAATAA | |
| pEG3567 | LcnA | ACTAAAGGCCTGGACAAAATGCTTTTAACCAAAAAGAAGAAGGATAGTATGGGT | 641 |
| | | CTGCTGAACGAAATCGACGTTACCACCCTGGATGAACAGTTAGGCGGTAAAATG | |
| | | AGCAAAGCATGGTGCCGATCCATGGTGGTGTCCTGCGTGTATAACCTGGTTGAT | |
| | | TTTTCGTCGTCGAGTGACGGGAAAAAGACATGTGCTCTGTACCGCAAATATTGT | |
| | | TAATAA | |
| pEG3568 | PalA | AAAGATCTTCTGAAGGAACTGATGTATGAAGTAGACCTCGAAGAGATGGAGAAT | 642 |
| | | CTTCAGGGTAGCGGGTACTCAGCCGCCCAGTGTGCCTGGATGGCGCTGAGCTGC | |
| | | GTCAATTACATCCCGGGAGTGGGATTCGGTTGTGGCGGCTACAGCGCATGTGAA | |
| | | CTCTACAAGCGTTATTGTTAATAA | |
| pEG3570 | RaxX | AACCACTCTAAGAAAAGTCCGGCAAAAGGGGCAGCGTCCCTGCAGCGTCCTGCT | 643 |
| | | GGGGCAAAAGGCCGCCCTGAACCTCTGGATCAACGCTTGTGGAAACACGTCGGT | |
| | | GGTGGTGACTACCCACCCCCAGGAGCCAACCCAAAGCATGATCCACCACCCCGC | |
| | | AATCCGGGCCACCATTAATAA | |
| pEG3571 | ComX | CAAGATCTGATTAATTACTTCCTGAATTATCCTGAGGCTCTGAAGAAACTCAAG | 644 |
| | | AATAAGGAAGCCTGCTTAATTGGGTTTGACGTCCAGGAAACCGAAACGATTATC | |
| | | AAAGCCTATAACGATTACTACCGCGCTGATCCGATCACGCGTCAATGGGGTGAT | |
| | | TAATAA | |
| pEG3572 | KgpE | AAGAACCCGACGCTGTTGCCCAAACTGACCGCGCCGGTCGAACGTCCGGCCGTA | 645 |
| | | ACTTCGTCGGATTTAAAGCAAGCCTCAAGCGTCGATGCTGCATGGTTAAATGGC | |
| | | GATAATAACTGGTCAACCCCATTCGCCGGTGTGAACGCGGCATGGTTAAATGGG | |
| | | GACAACAACTGGTCCACGCCTTTTGCGGGCGTGAATGCTGCATGGCTTAATGGC | |
| | | GACAATAACTGGAGCACTCCATTTGCCGCCGATGGCGCTGAGTAATAA | |
| pEG3574 | TgnA* | TATCGACCTTATATTGCCAAGTATGTCGAAGAACAAACTCTGCAGAATTCAACC | 646 |
| | | AACCTGGTATATGACGACATCACGCAGATCTCTTTTATCAATAAAGAAAAGAAC | |
| | | GTGAAAAAAATTAATCTGGGTCCCGATACTACGATCGTGACTGAAACCATCGAG | |
| | | AATGCGGACCCCGATGAGTATTTCTTATAATAA | |
| pEG3871 | SgbA | TCTGGTCGCGGGCGCGATCCTGATGCTGCTGTACCTCCCTTGCCTCGTGTACCT | 647 |
| | | CGCACTACTAATCATGAGCCACGTACGGCGTCCCGAGAACCAAGAGCAGCTCCA | |
| | | AGAACTGGACCTACACGTCCGCCTTCGTCGCGTCCATCTCCGTGTGGTCACTCT | |
| | | CCTCAAACCCCTGGTGCAGGACGCAGTGGATGTCGTGTGGAGCGTCAAAAATCG | |
| | | GCTGCGGCTTCGTCTGAGAAGGAAAAGACAATGGAGAACCAAGATTTGGAGTTA | |
| | | TTAGCACGCCTGCATGCACTTCCTGAGACTGAACCGGTGGGCGTCGACGGATTA | |
| | | CCCTATGGCGAGACTTGTGAGTGCGTCGGGTTACTTACGTTGTTGAACACCGTA | |
| | | TGTATCGGCATTTCATGCGCTTAATAA | |
| pEG3905 | TruE | ATGAACAAGAAGAACATTTTACCGCAGTTAGGACAACCAGTCATCCGCCTTACT | 648 |
| | | GCCGGTCAACTGTCAAGCCAACTGGCGGAGCTTTCTGAGGAGGCTCTGGGAGTC | |
| | | GATGCCTCGACCTTGCCGGTTCCGACGTTGTGTAGCTATGACGGGGTGGACGCT | |
| | | AGCACAGTCCCTACACTTTGTAGTTACGATGAC | |
| bEG_S6 | RSTc | CACATTTCCCCGAAAAGTGCCACCTGACGTCTAAGAAACCATTATTATCATGAC | 649 |
| | expression | ATTAACCTATAAAAATAGGCGTATCACGAGGCAGAATTTCAGATAAAAAAAATC | |
| | vector | CTTAGCTTTCGCTAAGGATGATTTCTGGAATTCGCGGCCGCTTCTAGAGGGAGA | |
| | | ACGATCGTTGGCTGaatcataaaaaatttatttgctttgtgagcggataacaat | |
| | | [chemical structure] | |
| | | [chemical structure] | |
| | | AAGGAGAAGAACTTTTCACTGGAGTTGTCCCAATTCTTGTTGAATTAGATGGTG | |
| | | ATGTTAATGGGCACAAATTTTCTGTCCGTGGAGAGGGTGAAGGTGATGCTACAA | |
| | | ACGGAAAACTCACCCTTAAATTTATTTGCACTACTGGAAAACTACCTGTTCCGT | |
| | | GGCCAACACTTGTCACTACTCTGACCTATGGTGTTCAATGCTTTTCCCGTTATC | |
| | | CGGATCACATGAAACGGCATGACTTTTTCAAGAGTGCCATGCCCGAAGGTTATG | |
| | | TACAGGAACGCACTATATCTTTCAAAGATGACGGGACCTACAAGACGCGTGCTG | |
| | | AAGTCAAGTTTGAAGGTGATACCCTTGTTAATCGTATCGAGTTAAAGGGTATTG | |
| | | ATTTTAAAGAAGATGGAAACATTCTTGGACACAAACTCGAGTACAACTTTAACT | |
| | | CACACAATGTATACATCACGGCAGACAAACAAAAGAATGGAATCAAAGCTAACT | |
| | | TCAAAATTCGCCACAACGTTGAAGATGGTTCCGTTCAACTAGCAGACCATTATC | |
| | | AACAAAATACTCCAATTGGCGATGGCCCTGTCCTTTTACCAGACAACCATTACC | |
| | | TGTCGACACAATCTGTCCTTTCGAAAGATCCCAACGAAAAGCGTGACCACATGG | |
| | | TCCTTCTTGAGTTTGTAACTGCTGCTGGGATTACACATGGCATGGATGAGCTCT | |
| | | ACAAACGACTGGTTCCGCGTGGTAGCTATTACGACTCCATTCCCACAAGCGAGA | |
| | | ACGACTCAGAAGTCAATCAAGAAGCTAAGCCAGAGGTCAAGCCAGAAGTCAAGC | |
| | | CTGAGACTCACATCAATTTAAAGGTGTCCGATGGATCTTCAGAGATCTTCTTCA | |
| | | AGATCAAAAAGACCACTCCTTTAAGAAGGCTGATGGAAGCGTTCGCTAAAAGAC | |
| | | AGGGTAAGGAAATGGACTCCTTAAGATTCTTGTACGACGGTATTAGAATTCAAG | |
| | | CTGATCAGGCCCCTGAAGATTTGGACATGGAGGATAACGATATTATTGAGGCTC | |
| | | ACCGCGAACAGATTGGAGGCTCCATTACAAGCCACCATCACCATCATCACGGTT | |
| | | AATACTTTCAGCCAAAAAACTTAAGACCGCCGGTCTTGTCCACTACCTTGCAGT | |
| | | AATGCGGTGGACAGGATCGGCGGTTTTCTTTTCTCTTCTCAACAAGTGAGACCA | |
| | | TGGgcggcgcgccatcgaatggcgcaaaacctttcgcggtatggcatgatagcg | |
| | | [chemical structure] | |
| | | TGTCGCAGAGTATGCCGGTGTCTCTTATCAGACCGTTTCCCGCGTGGTGAACCA | |
| | | GGCCAGCCACGTTTCTGCGAAAACGCGGGAAAAAGTGGAAGCGGCGATGGCGGA | |
| | | GCTGAATTACATTCCCAACCGCGTGGCACAACAACTGGCGGGCAAACAGTCGTT | |
| | | GCTTATTGGCGTTGCCACCTCCAGTCTGGCCCTGCACGCGCCGTCGCAAATTGT | |
| | | CGCGGCGATTAAATCTCGCGCCGATCAACTGGGTGCCAGCGTGGTGGTGTCGAT | |
| | | GGTAGAACGAAGCGGCGTCGAAGCCTGTAAAGCGGCGGTGCACAATCTTCTCGC | |
| | | GCAACGCGTCAGTGGGCTGATCATTAACTATCCGCTGGATGACCAGGATGCCAT | |
| | | TGCTGTGGAAGCTGCCTGCACTAATGTTCCGGCGTTATTTCTTGATGTCTCTGA | |
| | | CCAGACACCCATCAACAGTATTATTTTCTCCCATGAGGACGGTACGCGACTGGG | |
| | | CGTGGAGCATCTGGTCGCATTGGGTCACCAGCAAATCGCGCTGTTAGCGGGCCC | |
| | | ATTAAGTTCTGTCTCGGCGCGTCTGCGTCTGGCTGGCTGGCATAAATATCTCAC | |
| | | TCGCAATCAAATTCAGCCGATAGCGGAACGGGAAGGCGACTGGAGTGCCATGTC | |
| | | CGGTTTTCAACAAACCATGCAAATGCTGAATGAGGGCATCGTTCCCACTGCGAT | |
| | | GCTGGTTGCCAACGATCAGATGGCGCTGGGCGCAATGCGCGCCATTACCGAGTC | |
| | | CGGGCTGCGCGTTGGTGCGGATATCTCGGTAGTGGGATACGACGATACCGAAGA | |
| | | TAGCTCATGTTATATCCCGCCGTTAACCACCATCAAACAGGATTTTCGCCTGCT | |
| | | GGGGCAAACCAGCGTGGACCGCTTGCTGCAACTCTCTCAGGGCCAGGCGGTGAA | |
| | | GGGCAATCAGCTGTTGCCAGTCTCACTGGTGAAAAGAAAAACCACCCTGGCGCC | |
| | | CAATACGCAAACCGCCTCTCCCCGCGCGTTGGCCGATTCATTAATGCAGCTGGC | |
| | | ACGACAGGTTTCCCGACTGGAAAGCGGGCAGTGATAATTGGTAACGAATCAGAC | |
| | | AATTGACGGCTCGAGGGAGTAGCATAGGGTTTGCAGAATCCCTGCTTCGTCCAT | |
| | | TTGACAGGCACATTATGCATCGATGATAAGCTGTCAAACATGAGCACGCTTACT | |
| | | AGTAGCGGCCGCTGCAGTCCGGCAAAAAAGGGCAAGGTGTCACCACCCTGCCCT | |
| | | TTTTCTTTAAAACCGAAAAGATTACTTCGCGTTATGCAGGCTTCCTCGCTCACT | |
| | | GACTCGCTGCGCTCGGTCGTTCGGCTGCGGCGAGCGGTATCAGCTCACTCAAAG | |
| | | GCGGTAATGACAGTAAGACGGGTAAGCCTGTTGATGATACCGCTGCCTTACTGG | |
| | | GTGCATTAGCCAGTCTGAATGACCTGTCACGGGATAATCCGAAGTGGTCAGACT | |
| | | GGAAAATCAGAGGGCAGGAACTGCTGAACAGCAAAAAGTCAGATAGCACCACAT | |
| | | AGCAGACCCGCCATAAAACGCCCTGAGAAGCCCGTGACGGGCTTTTCTTGTATT | |
| | | ATGGGTAGTTTCCTTGCATGAATCCATAAAAGGCGCCTGTAGTGCCATTTACCC | |
| | | CCATTCACTGCCAGAGCCGTGAGCGCAGCGAACTGAATGTCACGAAAAAGACAG | |
| | | CGACTCAGGTGCCTGATGGTCGGAGACAAAAGGAATATTCAGCGATTTGCCCGA | |
| | | GCTTGCGAGGGTGCTACTTAAGCCTTTAGGGTTTTAAGGTCTGTTTTGTAGAGG | |
| | | AGCAAACAGCGTTTGCGACATCCTTTTGTAATACTGCGGAACTGACTAAAGTAG | |
| | | TGAGTTATACACAGGGCTGGGATCTATTCTTTTTATCTTTTTTTATTCTTTCTT | |
| | | TATTCTATAAATTATAACCACTTGAATATAAACAAAAAAAACACACAAAGGTCT | |
| | | AGCGGAATTTACAGAGGGTCTAGCAGAATTTACAAGTTTTCCAGCAAAGGTCTA | |
| | | GCAGAATTTACAGATACCCACAACTCAAAGGAAAAGGACTAGTAATTATCATTG | |
| | | ACTAGCCCATCTCAATTGGTATAGTGATTAAAATCACCTAGACCAATTGAGATG | |
| | | TATGTCTGAATTAGTTGTTTTCAAAGCAAATGAACTAGCGATTAGTCGCTATGA | |
| | | CTTAACGGAGCATGAAACCAAGCTAATTTTATGCTGTGTGGCACTACTCAACCC | |
| | | CACGATTGAAAACCCTACAAGGAAAGAACGGACGGTATCGTTCACTTATAACCA | |
| | | ATACGCTCAGATGATGAACATCAGTAGGGAAAATGCTTATGGTGTATTAGCTAA | |
| | | AGCAACCAGAGAGCTGATGACGAGAACTGTGGAAATCAGGAATCCTTTGGTTAA | |
| | | AGGCTTTTGGATTTTCCAGTGGACAAACTATGCCAAGTTCTCAAGCGAAAAATT | |
| | | AGAATTAGTTTTTAGTGAAGAGATATTGCCTTATCTTTTCCAGTTAAAAAAATT | |
| | | CATAAAATATAATCTGGAACATGTTAAGTCTTTTGAAAACAAATACTCTATGAG | |
| | | GATTTATGAGTGGTTATTAAAAGAACTAACACAAAAGAAAACTCACAAGGCAAA | |
| | | TATAGAGATTAGCCTTGATGAATTTAAGTTCATGTTAATGCTTGAAAATAACTA | |
| | | CCATGAGTTTAAAAGGCTTAACCAATGGGTTTTGAAACCAATAAGTAAAGATTT | |
| | | AAACACTTACAGCAATATGAAATTGGTGGTTGATAAGCGAGGCCGCCCGACTGA | |
| | | TACGTTGATTTTCCAAGTTGAACTAGATAGACAAATGGATCTCGTAACCGAACT | |
| | | TGAGAACAACCAGATAAAAATGAATGGTGACAAAATACCAACAACCATTACATC | |
| | | AGATTCCTACCTACATAACGGACTAAGAAAAACACTACACGATGCTTTAACTGC | |
| | | AAAAATTCAGCTCACCAGTTTTGAGGCAAAATTTTTGAGTGACATGCAAAGTAA | |
| | | GTATGATCTCAATGGTTCGTTCTCATGGCTCACGCAAAAACAACGAACCACACT | |
| | | AGAGAACATACTGGCTAAATACGGAAGGATCTGAGGTTCTTATGGCTCTTGTAT | |
| | | CTATCAGTGAAGCATCAAGACTAACAAACAAAAGTAGAACAACTGTTCACCGTT | |
| | | ACATATCAAAGGGAAAACTGTCCATATGCACAGATGAAAACGGTGTAAAAAAGA | |
| | | TAGATACATCAGAGCTTTTACGAGTTTTTGGTGCATTCAAAGCTGTTCACCATG | |
| | | AACAGATCGACAATGTAACAGATGAACAGCATGTAACACCTAATAGAACAGGTG | |
| | | AAACCAGTAAAACAAAGCAACTAGAACATGAAATTGAACACCTGAGACAACTTG | |
| | | TTACAGCTCAACAGTCACACATAGACAGCCTGAAACAGGCGATGCTGCTTATCG | |
| | | AATCAAAGCTGCCGACAACACGGGAGCCAGTGACGCCTCCCGTGGGGAAAAAAT | |
| | | CATGGCAATTCTGGAAGAAATAGCGCTTTCAGCCGGCAAACCGGCTGAAGCCGG | |
| | | ATCTGCGATTCTGATAACAAACTAGCAACACCAGAACAGCCCGTTTGCGGGCAG | |
| | | CAAAACCCGTACCGATTATCAAAAAGGATCTTCACCTAGATCCTTTTAAATTAA | |
| | | AAATGAAGTTTTAAATCAATCTAAAGTATATATGAGTAAACTTGGTCTGACAGT | |
| | | TACCAATGCTTAATCAGTGAGGCACCTATCTCAGCGATCTGTCTATTTCGTTCA | |
| | | TCCATAGTTGCCTGACTCCCCGTCGTGTAGATAACTACGATACGGGAGGGCTTA | |
| | | CCATCTGGCCCCAGTGCTGCAATGATACCGCGAGAACCACGCTCACCGGCTCCA | |
| | | GATTTATCAGCAATAAACCAGCCAGCCGGAAGGGCCGAGCGCAGAAGTGGTCCT | |
| | | GCAACTTTATCCGCCTCCATCCAGTCTATTAATTGTTGCCGGGAAGCTAGAGTA | |
| | | AGTAGTTCGCCAGTTAATAGTTTGCGCAACGTTGTTGCCATTGCTACAGGCATC | |
| | | GTGGTGTCACGCTCGTCGTTTGGTATGGCTTCATTCAGCTCCGGTTCCCAACGA | |
| | | TCAAGGCGAGTTACATGATCCCCCATGTTGTGCAAAAAAGCGGTTAGCTCCTTC | |
| | | GGTCCTCCGATCGTTGTCAGAAGTAAGTTGGCCGCAGTGTTATCACTCATGGTT | |
| | | ATGGCAGCACTGCATAATTCTCTTACTGTCATGCCATCCGTAAGATGCTTTTCT | |
| | | GTGACTGGTGAGTACTCAACCAAGTCATTCTGAGAATAGTGTATGCGGCGACCG | |
| | | AGTTGCTCTTGCCCGGCGTCAATACGGGATAATACCGCGCCACATAGCAGAACT | |
| | | TTAAAAGTGCTCATCATTGGAAAACGTTCTTCGGGGCGAAAACTCTCAAGGATC | |
| | | TTACCGCTGTTGAGATCCAGTTCGATATAACCCACTCGTGCACCCAACTGATCT | |
| | | TCAGCATCTTTTACTTTCACCAGCGTTTCTGGGTGAGCAAAAACAGGAAGGCAA | |
| | | AATGCCGCAAAAAAGGGAATAAGGGCGACACGGAAATGTTGAATACTCATACTC | |
| | | TTCCTTTTTCAATATTATTGAAGCATTTATCAGGGTTATTGTCTCATGAGCGGA | |
| | | TACATATTTGAATGTATTTAGAAAAATAAACAAATAGGGGTTCCGCG | |
| pEG3212 | CapA | ATGGTGCGTTTCCTGGCTAAGCTGCTGCGTTCAACGATCCATGGCTCTAATGGC | 650 |
| | | GTGAGCCTCGACGCCGTCAGTTCCACGCATGGTACTCCGGGGTTTCAGACACCT | |
| | | GATGCACGTGTTATTTCACGCTTTGGCTTTAAT | |
| pEG3213 | LasA | ATGGACAAACGTGTGCGTTACGAAAAACCGAGCCTGGTGAAAGAGGGTACGTTT | 651 |
| | | CGCAAAACTACCGCTGGCCTGCGGCGTCTGTTCGCTGACCAGCTGGTTGGCCGC | |
| | | CGTAACATT | |
| pEG3214 | AlbsA | ATGGATTCACTGCTGTCAACAGAAACCGTCATTAGTGATGACGAACTGCTTCCG | 652 |
| | | ATTGAAGTTGGTGGTACCGCGGAATTGACAGAGGGGCAGGGCGGCGGTCAGTCC | |
| | | GAGGATAAACGTCGCGCTTATAACTGC | |
| pEG3215 | AtxAl | CCGATCATTAGCGAAACGGTCCAGCCTAAAACGGCTGGCCTGATTGTTCTGGGC | 653 |
| | | AAGGCAAGCGCGGAAACGCGCGGATTGAGCCAAGGCGTGGAACCGGACATTGGT | |
| | | CAGACGTACTTCGAAGAAAGCCGTATTAATCAGGAT | |
| pEG3553 | ClnlAl | ACTCCCATTCAATCCAAATTCTGCCTCCTGCGCGTGGGCAGTGCCAAACGGCTG | 654 |
| | | ACGCAGTCATTCGACGTGGGAACTATTAAGGAAGGTTTAGTCAGCCAGTATTAT | |
| | | TTTGCG | |
| pEG3554 | ClnlA2 | ACCCAGGTGAGCCCATCACCGCTGCGCCTGATTCGCGTCGGGAGAGCCTTGGAC | 655 |
| | | CTGACCCGCTCTATCGGGGATAGTGGGCTGCGTGAGTCCATGTCAAGCCAGACG | |
| | | TACTGGCCC | |
| pEG3555 | Cln2Al | AACACTTTAAAAACGCGTCTTATTCGCTTTGGGTCGGCTAAACGTCTGACGCGC | 656 |
| | | GCAGGTACGGGCGTGCTGTTACCTGAAACCAACCAGATTAAGCGCTACGATCCA | |
| | | GCA | |
| pEG3556 | Cln2A2 | ACCACACCCAAATTTCGACTGATTCGGTTAGGTTCAGCTAAGCGATTGACCCGG | 657 |
| | | TCGGGAATCGGGGATGTGTTTCCGGAGCCAAACATGGTTCGCCGCTGGGAT | |
| pEG3557 | Cln3Al | CAGCGTATAATAGATGAAACCACCGATGGTCTGATTGAACTGGGGGCGGCCAGC | 658 |
| | | GTACAGACACAGGGCGATGTTTTGTTTGCTCCGGAGCCTGGCGTGGGCCGACCT | |
| | | CCAATGGGCCTTTCCGAAGAT | |
| pEG3558 | Cln3A2 | GAACGCATTGAAGATCATATTGATGATGAACTGATTGACCTGGGAGCTGCTTCG | 659 |
| | | GTTGAAACCCAGGGAGATGTGCTGAATGCACCGGAGCCTGGTATCGGTCGTGAA | |
| | | CCGACAGGCTTGAGCCGCGAT | |
| pEG3559 | Cln3A3 | GAATTTGAAGGTATCCCATCACCGGATGCGCGTATTGATTTGGGTCTGGCGTCG | 660 |
| | | GAAGAAACCTGTGGTCAGATTTATGATCACCCGGAAGTAGGCATCGGTGCGTAC | |
| | | GGGTGCGAGGGCCTGCAGCGT | |
| pEG3560 | CsegAl | ACCAAGAAAAACGCAACACAGGCCCCACGTTTAGTACGTGTAGGCGATGCTCAT | 661 |
| | | CGTTTGACCCAAGGTGCTTTCGTTGGACAGCCGGAAGCCGTAAATCCACTTGGA | |
| | | CGTGAAATTCAAGGA | |
| pEG3561 | CsegA2 | ACCAAAACACACAGACTGATCAGATTGGGCGACGCGCAACGCTTGACCCAGGGC | 662 |
| | | ACATTGACTCCGGGCTTACCGGAGGACTTTCTGCCGGGCCATTACATGCCGGGG | |
| pEG3562 | CsegA3 | ACTTCACGTTTCCAACTCCTGCGCCTGGGAAAAGCCGATCGTTTGACGCGTGGC | 663 |
| | | GCGCTGGTCGGGCTCCTGATCGAAGATATTACTGTCGCTCGCTACGACCCTATG | |
| bEG_S7 | Lux Mod | pEG1128 below contains the full sequence of this | |
| | Backbone | backbone. | |
| pEG1128 | TruD | AACACCCCTTGTATTACTGTTTATGTAAGCAGACAGTTTTATTGTTCATGATGA | 664 |
| | | TATATTTTTATCTTGTGCAATGTACATCAGAGATTTTGAGACACAACCAATTAT | |
| | | TGAAGGCCTCCCTAACGGGGGGCCTTTTTTTGTTTCTGGTCTCCACGACGCTTA | |
| | | ACGATCGTTGGCTGacctgtaggatcgtacaggtttacgcaagaaaatggtttg | |
| | | ttacagtcgaataaaCAGCCCCATAGGGTGGTGTGTACCACCCCTGATGAGTCC | |
| | | [chemical structure] | |
| | | [chemical structure] | |
| | | TCCACGTTGAGATAATTGAGCCGAAGCAAGTGTATCTCCTGGGCGAACAGGGCA | |
| | | ACCACGCTCTCACCGGGCAGCTCTACTGCCAAATTCTGCCTTTCTTAAACGGCG | |
| | | AATACACCCGAGAACAAATTGTGGAAAAGCTCGATGGGCAGGTCCCGGAGGAAT | |
| | | ATATCGACTTCGTACTCAGTCGTCTGGTGGAGAAGGGCTATCTAACTGAGGTGG | |
| | | CTCCAGAACTATCCCTGGAAGTGGCAGCATTTTGGAGCGAATTGGGAATTGCCC | |
| | | CTTCTGTAGTGGCAGAAGGGCTAAAGCAGCCAGTGACAGTGACAACGGCGGGCA | |
| | | AGGGCATTAGGGAAGGGATAGTGGCTAACCTGGCAGCAGCGCTGGAGGAAGCTG | |
| | | GCATTCAGGTGTCAGACCCAAGGGACCCAAAGGCCCCAAAGGCAGGGGATTCTA | |
| | | CTGCCCAGCTTCAGGTGGTGCTGACCGATGACTATTTACAGCCGGAACTTGCAG | |
| | | CGATCAACAAGGAAGCCTTAGAGCGCCAACAACCCTGGTTGCTGGTTAAGCCTG | |
| | | TGGGCAGTATCCTCTGGTTGGGACCGTTGTTCGTTCCTGGGGAAACCGGATGTT | |
| | | GGCACTGTCTTGCTCAACGATTGCAAGGCAACCGGGAAGTTGAAGCATCGGTAT | |
| | | TGCAACAAAAGCGAGCGCTGCAGGAGCGCAACGGTCAAAATAAAAATGGTGCAG | |
| | | TGAGTTGCTTGCCCACAGCACGGGCAACCCTACCTTCTACTCTACAAACAGGTT | |
| | | TACAGTGGGCTGCCACTGAGATTGCTAAGTGGATGGTCAAGCGGCACCTCAATG | |
| | | CCATAGCACCGGGAACGGCTCGTTTTCCCACTCTAGCTGGCAAGATATTTACAT | |
| | | TCAACCAGACGACTCTGGAGTTGAAAGCTCATCCTCTGAGCCGACGACCGCAAT | |
| | | GTCCCACCTGTGGCGATCGGGAAACTCTCCAACGGCGCGGGTTTGAACCACTGA | |
| | | AGCTAGAGTCGCGCCCCAAACACTTCACCTCCGATGGCGGTCATCGCGCCATGA | |
| | | CCCCAGAACAAACGGTGCAGAAGTACCAACACCTCATCGGGCCCATAACGGGGG | |
| | | TAGTGACGGAACTGGTGCGAATTTCTGACCCTGCCAATCCCTTGGTGCATACCT | |
| | | ACCGGGCTGGGCATAGCTTTGGCAGTGCTACGTCTCTGCGGGGGCTGCGCAATG | |
| | | TCCTACGCCACAAGAGTTCTGGTAAAGGCAAGACCGATAGCCAATCTCGGGCCA | |
| | | GCGGACTTTGCGAGGCGATCGAGCGCTATTCGGGCATTTTTCAGGGAGACGAAC | |
| | | CCCGCAAGCGGGCAACTTTGGCTGAGTTGGGAGATTTGGCGATTCATCCAGAAC | |
| | | AGTGTTTGCACTTTAGCGACAGGCAGTATGACAACCGGGAAAGCTCGAACGAGC | |
| | | GAGCAACAGTGACTCACGACTGGATTCCCCAACGGTTCGATGCAAGTAAGGCTC | |
| | | ACGACTGGACTCCCGTGTGGTCCCTAACGGAGCAAACCCATAAGTATCTGCCTA | |
| | | CAGCCCTGTGCTATTACCGATACCCCTTCCCCCCAGAACACCGTTTCTGCCGTA | |
| | | GTGACTCCAACGGAAACGCGGCGGGAAATACCCTGGAAGAGGCGATTTTGCAAG | |
| | | GATTTATGGAACTGGTGGAACGGGATAGCGTGTGCCTGTGGTGGTACAATCGCG | |
| | | TTAGCCGTCCGGCTGTGGATTTGAGTAGCTTTGACGAGCCTTATTTTTTGCAGT | |
| | | TGCAGCAGTTCTATCAAACTCAAAATCGCGATCTGTGGGTACTGGATTTAACAG | |
| | | CAGATTTGGGCATTCCGGCTTTTGTAGGGGTATCGAATCGGAAAGCCGGCAGCT | |
| | | CGGAAAGAATAATTCTCGGCTTTGGAGCGCACCTGGACCCGACAGTTGCCATCC | |
| | | TTCGCGCTCTTACGGAGGTCAACCAAATAGGCTTGGAATTGGATAAAGTTTCTG | |
| | | ATGAGAGCCTCAAGAACGATGCCACGGATTGGTTAGTGAATGCTACATTGGCAG | |
| | | CTAGTCCCTATCTCGTTGCCGATGCTAGCCAACCCCTCAAGACTGCGAAGGATT | |
| | | ATCCCCGGCGTTGGAGTGACGATATTTACACCGATGTGATGACTTGTGTAGAAA | |
| | | TAGCCAAGCAAGCAGGTCTAGAGACTTTGGTACTGGATCAGACCAGACCCGACA | |
| | | TAGGTTTAAATGTGGTTAAAGTCATTGTGCCAGGAATGCGTTTTTGGTCGCGAT | |
| | | TTGGCTCCGGTCGGCTCTATGACGTGCCAGTGAAGTTGGGATGGCGAGAGCAAC | |
| | | CACTTGCTGAGGCACAAATGAACCCTACACCGATGCCATTTTAATAAGATACGA | |
| | | ATTTATGTATAGACTCGGTACCAAAAAAAAAAAAAAAGACGCTGAAAAGCGTCT | |
| | | TTTTTTTTTTTGGTCCTACTATCCTTAAACGCATATCGTGGTACAGGAGACCGT | |
| | | CCAATGgcggcgcgccatcgaatggcgcaaaacctttcgcggtatggcatgata | |
| | | gcgcccggaagagagtcaattcagggtggtgaatATGAAAAACATAAATGCCGA | |
| | | CGACACATACAGAATAATTAATAAAATTAAAGCTTGTAGAAGCAATAATGATAT | |
| | | TAATCAATGCTTATCTGATATGACTAAAATGGTACATTGTGAATATTATTTACT | |
| | | CGCGATCATTTATCCTCATTCTATGGTTAAATCTGATATTTCAATCCTAGATAA | |
| | | TTACCCTAAAAAATGGAGGCAATATTATGATGACGCTAATTTAATAAAATATGA | |
| | | TCCTATAGTAGATTATTCTAACTCCAATCATTCACCAATTAATTGGAATATATT | |
| | | TGAAAACAATGCTGTAAATAAAAAATCTCCAAATGTAATTAAAGAAGCGAAAAC | |
| | | ATCAGGTCTTATCACTGGGTTTAGTTTCCCTATTCATACGGCTAACAATGGCTT | |
| | | CGGAATGCTTAGTTTTGCACATTCAGAAAAAGACAACTATATAGATAGTTTATT | |
| | | TTTACATGCGTGTATGAACATACCATTAATTGTTCCTTCTCTAGTTGATAATTA | |
| | | TCGAAAAATAAATATAGCAAATAATAAATCAAACAACGATTTAACCAAAAGAGA | |
| | | AAAAGAATGTTTAGCGTGGGCATGCGAAGGAAAAAGCTCTTGGGATATTTCAAA | |
| | | AATATTAGGTTGCAGTGAGCGTACTGTCACTTTCCATTTAACCAATGCGCAAAT | |
| | | GAAACTCAATACAACAAACCGCTGCCAAAGTATTTCTAAAGCAATTTTAACAGG | |
| | | AGCAATTGATTGCCCATACTTTAAAAATTGATAAGGATCCTAATTGGTAACGAA | |
| | | TCAGACAATTGACGGCTCGAGGGAGTAGCATAGGGTTTGCAGAATCCCTGCTTC | |
| | | GTCCATTTGACAGGCACATTATGCATCGATGATAAGCTGTCAAACATGAGCAGA | |
| | | TCCTCTACGCCGGACGCATCGTGGCCGGCATCACCGGCGCCACAGGTGCGGTTG | |
| | | CTGGCGCCTATATCGCCGACATCACCGATGGGGAAGATCGGGCTCGCCACTTCG | |
| | | GGCTCATGAGCAAATATTTTATCTGAGGTGCTTCCTCGCTCACTGACTCGCTGC | |
| | | ACGAGGCAGACCTCAGCGCTAGCGGAGTGTATACTGGCTTACTATGTTGGCACT | |
| | | GATGAGGGTGTCAGTGAAGTGCTTCATGTGGCAGGAGAAAAAAGGCTGCACCGG | |
| | | TGCGTCAGCAGAATATGTGATACAGGATATATTCCGCTTCCTCGCTCACTGACT | |
| | | CGCTACGCTCGGTCGTTCGACTGCGGCGAGCGGAAATGGCTTACGAACGGGGCG | |
| | | GAGATTTCCTGGAAGATGCCAGGAAGATACTTAACAGGGAAGTGAGAGGGCCGC | |
| | | GGCAAAGCCGTTTTTCCATAGGCTCCGCCCCCCTGACAAGCATCACGAAATCTG | |
| | | ACGCTCAAATCAGTGGTGGCGAAACCCGACAGGACTATAAAGATACCAGGCGTT | |
| | | TCCCCTGGCGGCTCCCTCGTGCGCTCTCCTGTTCCTGCCTTTCGGTTTACCGGT | |
| | | GTCATTCCGCTGTTATGGCCGCGTTTGTCTCATTCCACGCCTGACACTCAGTTC | |
| | | CGGGTAGGCAGTTCGCTCCAAGCTGGACTGTATGCACGAACCCCCCGTTCAGTC | |
| | | CGACCGCTGCGCCTTATCCGGTAACTATCGTCTTGAGTCCAACCCGGAAAGACA | |
| | | TGCAAAAGCACCACTGGCAGCAGCCACTGGTAATTGATTTAGAGGAGTTAGTCT | |
| | | TGAAGTCATGCGCCGGTTAAGGCTAAACTGAAAGGACAAGTTTTGGTGACTGCG | |
| | | CTCCTCCAAGCCAGTTACCTCGGTTCAAAGAGTTGGTAGCTCAGAGAACCTTCG | |
| | | AAAAACCGCCCTGCAAGGCGGTTTTTTCGTTTTCAGAGCAAGAGATTACGCGCA | |
| | | GACCAAAACGATCTCAAGAAGATCATCTTATTAAGGGGTCTGACGCTCAGTGGA | |
| | | ACGAAAAATCAATCTAAAGTATATATGAGTAAACTTGGTCTGACAGTTACCTTA | |
| | | GAAAAACTCATCGAGCATCAAATGAAACTGCAATTTATTCATATCAGGATTATC | |
| | | AATACCATATTTTTGAAAAAGCCGTTTCTGTAATGAAGGAGAAAACTCACCGAG | |
| | | GCAGTTCCATAGGATGGCAAGATCCTGGTATCGGTCTGCGATTCCGACTCGTCC | |
| | | AACATCAATACAACCTATTAATTTCCCCTCGTCAAAAATAAGGTTATCAAGTGA | |
| | | GAAATCACCATGAGTGACGACTGAATCCGGTGAGAATGGCAAAAGCTTATGCAT | |
| | | TTCTTTCCAGACTTGTTCAACAGGCCAGCCATTACGCTCGTCATCAAAATCACT | |
| | | CGCATCAACCAAACCGTTATTCATTCGTGATTGCGCCTGAGCGAGACGAAATAC | |
| | | GCGATCGCTGTTAAAAGGACAATTACAAACAGGAATCGAATGCAACCGGCGCAG | |
| | | GAACACTGCCAGCGCATCAACAATATTTTCACCTGAATCAGGATATTCTTCTAA | |
| | | TACCTGGAATGCTGTTTTCCCGGGGATCGCAGTGGTGAGTAACCATGCATCATC | |
| | | AGGAGTACGGATAAAATGCTTGATGGTCGGAAGAGGCATAAATTCCGTCAGCCA | |
| | | GTTTAGTCTGACCATCTCATCTGTAACATCATTGGCAACGCTACCTTTGCCATG | |
| | | TTTCAGAAACAACTCTGGCGCATCGGGCTTCCCATACAATCGATAGATTGTCGC | |
| | | ACCTGATTGCCCGACATTATCGCGAGCCCATTTATACCCATATAAATCAGCATC | |
| | | CATGTTGGAATTTAATCGCGGCCTCGAGCAAGACGTTTCCCGTTGAATATGGCT | |
| | | CAT | |
| bEG_S8 | Cym Mod | AACACCCCTTGTATTACTGTTTATGTAAGCAGACAGTTTTATTGTTCATGATGA | 665 |
| | Backbone | TATATTTTTATCTTGTGCAATGTACATCAGAGATTTTGAGACACAACCAATTAT | |
| | without | TGAAGGCCTCCCTAACGGGGGGCCTTTTTTTGTTTCTGGTCTCCCAAGCGCTTA | |
| | SapI sites | ACGATCGTTGGCTGaacaaacagacaatctggtctgtttgtattatggaaaatt | |
| | around | tttctgtataatagattcaacaaacagacaatctggtctgtttgtattatCAGC | |
| | CDS | GGTCAACGCATGTGCTTTGCGTTCTGATGAGACAGTGATGTCGAAACCGCCTCT | |
| | | [chemical structure] | |
| | | CTTTTCACTGGAGTTGTCCCAATTCTTGTTGAATTAGATGGTGATGTTAATGGG | |
| | | CACAAATTTTCTGTCCGTGGAGAGGGTGAAGGTGATGCTACAAACGGAAAACTC | |
| | | ACCCTTAAATTTATTTGCACTACTGGAAAACTACCTGTTCCGTGGCCAACACTT | |
| | | GTCACTACTCTGACCTATGGTGTTCAATGCTTTTCCCGTTATCCGGATCACATG | |
| | | AAACGGCATGACTTTTTCAAGAGTGCCATGCCCGAAGGTTATGTACAGGAACGC | |
| | | ACTATATCTTTCAAAGATGACGGGACCTACAAGACGCGTGCTGAAGTCAAGTTT | |
| | | GAAGGTGATACCCTTGTTAATCGTATCGAGTTAAAGGGTATTGATTTTAAAGAA | |
| | | GATGGAAACATTCTTGGACACAAACTCGAGTACAACTTTAACTCACACAATGTA | |
| | | TACATCACGGCAGACAAACAAAAGAATGGAATCAAAGCTAACTTCAAAATTCGC | |
| | | CACAACGTTGAAGATGGTTCCGTTCAACTAGCAGACCATTATCAACAAAATACT | |
| | | CCAATTGGCGATGGCCCTGTCCTTTTACCAGACAACCATTACCTGTCGACACAA | |
| | | TCTGTCCTTTCGAAAGATCCCAACGAAAAGCGTGACCACATGGTCCTTCTTGAG | |
| | | TTTGTAACTGCTGCTGGGATTACACATGGCATGGATGAGCTCTACAAATAAGGA | |
| | | TGAGCTCTACAAATAAGCAGAGGTGGTTGTGTTGCGAAAAAAAAAAAAAAACAC | |
| | | CCTAACGGGTGTTTTTTTTTTTTTGGTGTCCCCACGTGTGGCGCTGGAGACCGT | |
| | | CCAATGgcggcgcgccatcgaatggtgcaaaacctttcgcggtatggcatgata | |
| | | [chemical structure] | |
| | | CCAGGCAGAACGTGCAATGGAAACCCAGGGTAAACTGATTGCAGCAGCACTGGG | |
| | | TGTTCTGCGTGAAAAAGGTTATGCAGGTTTTCGTATTGCAGATGTTCCGGGTGC | |
| | | AGCCGGTGTTAGCCGTGGTGCACAGAGCCATCATTTTCCGACCAAACTGGAACT | |
| | | GCTGCTGGCAACCTTTGAATGGCTGTATGAGCAGATTACCGAACGTAGCCGTGC | |
| | | ACGTCTGGCAAAACTGAAACCGGAAGATGATGTTATTCAGCAGATGCTGGATGA | |
| | | TGCAGCAGATTTTTTTCTGGATGATGATTTTAGCATCGGCCTGGATCTGATTGT | |
| | | TGCAGCAGATCGTGATCCGGCACTGCGTGAAGGTATTCTGCGTACCGTTGAACG | |
| | | TAATCGTTTTGTTGTTGAAGATATGTGGCTGGGTGTGCTGGTGAGCCGTGGTCT | |
| | | GAGCCGTGATGATGCCGAAGATATTCTGTGGCTGATTTTTAACAGCGTTCGTGG | |
| | | TCTGACAGTTCGTAGCCTGTGGCAGAAAGATAAAGAACGTTTTGAACGTGTGCG | |
| | | TAATAGCACCCTGGAAATTGCACGTGAACGTTATGCAAAATTCAAACGTTGATA | |
| | | AGGATCCTAATTGGTAACGAATCAGACAATTGACGGCTCGAGGGAGTAGCATAG | |
| | | GGTTTGCAGAATCCCTGCTTCGTCCATTTGACAGGCACATTATGCATCGATGAT | |
| | | AAGCTGTCAAACATGAGCAGATCCTCTACGCCGGACGCATCGTGGCCGGCATCA | |
| | | CCGGCGCCACAGGTGCGGTTGCTGGCGCCTATATCGCCGACATCACCGATGGGG | |
| | | AAGATCGGGCTCGCCACTTCGGGCTCATGAGCAAATATTTTATCTGAGGTGCTT | |
| | | CCTCGCTCACTGACTCGCTGCACGAGGCAGACCTCAGCGCTAGCGGAGTGTATA | |
| | | CTGGCTTACTATGTTGGCACTGATGAGGGTGTCAGTGAAGTGCTTCATGTGGCA | |
| | | GGAGAAAAAAGGCTGCACCGGTGCGTCAGCAGAATATGTGATACAGGATATATT | |
| | | CCGCTTCCTCGCTCACTGACTCGCTACGCTCGGTCGTTCGACTGCGGCGAGCGG | |
| | | AAATGGCTTACGAACGGGGCGGAGATTTCCTGGAAGATGCCAGGAAGATACTTA | |
| | | ACAGGGAAGTGAGAGGGCCGCGGCAAAGCCGTTTTTCCATAGGCTCCGCCCCCC | |
| | | TGACAAGCATCACGAAATCTGACGCTCAAATCAGTGGTGGCGAAACCCGACAGG | |
| | | ACTATAAAGATACCAGGCGTTTCCCCTGGCGGCTCCCTCGTGCGCTCTCCTGTT | |
| | | CCTGCCTTTCGGTTTACCGGTGTCATTCCGCTGTTATGGCCGCGTTTGTCTCAT | |
| | | TCCACGCCTGACACTCAGTTCCGGGTAGGCAGTTCGCTCCAAGCTGGACTGTAT | |
| | | GCACGAACCCCCCGTTCAGTCCGACCGCTGCGCCTTATCCGGTAACTATCGTCT | |
| | | TGAGTCCAACCCGGAAAGACATGCAAAAGCACCACTGGCAGCAGCCACTGGTAA | |
| | | TTGATTTAGAGGAGTTAGTCTTGAAGTCATGCGCCGGTTAAGGCTAAACTGAAA | |
| | | GGACAAGTTTTGGTGACTGCGCTCCTCCAAGCCAGTTACCTCGGTTCAAAGAGT | |
| | | TGGTAGCTCAGAGAACCTTCGAAAAACCGCCCTGCAAGGCGGTTTTTTCGTTTT | |
| | | CAGAGCAAGAGATTACGCGCAGACCAAAACGATCTCAAGAAGATCATCTTATTA | |
| | | AGGGGTCTGACGCTCAGTGGAACGAAAAATCAATCTAAAGTATATATGAGTAAA | |
| | | CTTGGTCTGACAGTTACCTTAGAAAAACTCATCGAGCATCAAATGAAACTGCAA | |
| | | TTTATTCATATCAGGATTATCAATACCATATTTTTGAAAAAGCCGTTTCTGTAA | |
| | | TGAAGGAGAAAACTCACCGAGGCAGTTCCATAGGATGGCAAGATCCTGGTATCG | |
| | | GTCTGCGATTCCGACTCGTCCAACATCAATACAACCTATTAATTTCCCCTCGTC | |
| | | AAAAATAAGGTTATCAAGTGAGAAATCACCATGAGTGACGACTGAATCCGGTGA | |
| | | GAATGGCAAAAGCTTATGCATTTCTTTCCAGACTTGTTCAACAGGCCAGCCATT | |
| | | ACGCTCGTCATCAAAATCACTCGCATCAACCAAACCGTTATTCATTCGTGATTG | |
| | | CGCCTGAGCGAGACGAAATACGCGATCGCTGTTAAAAGGACAATTACAAACAGG | |
| | | AATCGAATGCAACCGGCGCAGGAACACTGCCAGCGCATCAACAATATTTTCACC | |
| | | TGAATCAGGATATTCTTCTAATACCTGGAATGCTGTTTTCCCGGGGATCGCAGT | |
| | | GGTGAGTAACCATGCATCATCAGGAGTACGGATAAAATGCTTGATGGTCGGAAG | |
| | | AGGCATAAATTCCGTCAGCCAGTTTAGTCTGACCATCTCATCTGTAACATCATT | |
| | | GGCAACGCTACCTTTGCCATGTTTCAGAAACAACTCTGGCGCATCGGGCTTCCC | |
| | | ATACAATCGATAGATTGTCGCACCTGATTGCCCGACATTATCGCGAGCCCATTT | |
| | | ATACCCATATAAATCAGCATCCATGTTGGAATTTAATCGCGGCCTCGAGCAAGA | |
| | | CGTTTCCCGTTGAATATGGCTCAT | |
| pEG7172 | HalM1 | [chemical structure] | 666 |
| | | AGCGAAGTGGTTTTTGGACCGAATCTTGAGAAGATTGTAGGAGAAAAGCGCCTC | |
| | | AATTTTTGGCTCAAACTTATAGGTGAGGACCCGGAAAACCTGAAGGAGTTTCTC | |
| | | TCGAGAAAGGGCAATTCTTTCGAAGAACAAACCTTACCGGAAAAGGAAGCTATC | |
| | | GTTCCGAACCGCTTAGGTGAAGAGGCGCTGGAAAAAGTCCGCGAAGAACTTGAG | |
| | | TTCCTCAATACTTACAGCACTAAACATGTGCGTCGCGTTAAAGAGTTGGGAGTG | |
| | | CAGATCCCTTTCGAAGGGATTCTGCTGCCATTCATTAGCATGTATATCGAAAAA | |
| | | TTTCAGCAGCAGCAACTTCGCAAAAAGATAGGGCCGATTCACGAAGAGATCTGG | |
| | | ACGCAGATTGTTCAAGATATCACCTCCAAATTAAATGCGATTCTGCACCGTACC | |
| | | CTGATCCTGGAACTGAATGTAGCTCGTGTTACCTCCCAACTTAAAGGTGATACT | |
| | | CCGGAAGAAAGATTCGCCTACTACTCGAAAACCTATTTAGGCAAACGTGAAGTA | |
| | | ACTCACCGTCTGTATAGCGAATATCCGGTGGTTCTGCGGTTGCTGTTCACCACC | |
| | | ATTTCACACCACATTTCGTTCATTACGGAAATCCTTGAACGCGTTGCAAATGAC | |
| | | CGTGAAGCCATTGAAACCGAATTTTCACCGTGTTCCCCGATTGGTACCCTCGCC | |
| | | TCTCTCCACTTAAACTCGGGAGATGCTCACCATAAACAGCGTACTGTGACGATT | |
| | | TTGGAATTCTCCTCCTCGCTGAAACTTGTCTACAAACCTCGCTCCCTCAAAGTT | |
| | | GATGGGGTGTTCAACGGTTTACTCGCTTTCCTGAACGATAGAACGGGGGAAGTC | |
| | | ATTAAGGACCAGTATTGCCCTAAGGTGTTACAGCGCGATGGCTACGGCTATGTG | |
| | | GAATTTGTCACTCACCAGTCTTGTCAATCCCTTGAGGAAGTGTCAGACTTCTAC | |
| | | GAGAGACTCGGCTCTCTGATGAGTCTGTCCTACGTACTGAATAGTTCTGACTTT | |
| | | CATTTCGAGAACATTATAGCTCATGGTCCCTATCCTGTCCTGATCGATCTTGAA | |
| | | ACCATCATTCATAATACAGCGGATAGCAGCGAGGAAACGTCTACCGCTATGGAT | |
| | | CGCGCGTTCCGTATGTTGAACGATTCGGTGCTGTCCACTGGTATGCTTCCCTCC | |
| | | TCTATTTATTATCGCGATCAGCCGAATATGAAGGGTCTGAACGTCGGAGGTGTG | |
| | | AGCAAATCAGAAGGTCAGAAAACACCGTTCAAAGTTAATCAAATCGCCAATCGC | |
| | | AACACCGATGAGATGCGTATCGAAAAAGATCACGTTACCCTGAGCAGCCAGAAA | |
| | | AATCTGCCCATTTTTCAGTCTGCCGCAATGGAGAGCGTACATTTCTTAGATCAG | |
| | | ATCCAGAAAGGCTTTACCTCCATGTATCAGTGGATCGAGAAGAACAAACAAGAA | |
| | | TTTAAAGAACAGGTGCGTAAGTTTGAAGGTGTGCCGGTTCGTGCTGTTCTTCGG | |
| | | AGCACGACTCGCTATACCGAACTGCTGAAATCTTCCTACCACCCTGACCTGCTC | |
| | | CGCAGCGCGTTGGACCGTGAAGTACTGCTGAACCGTTTGACTGTTGACTCGGTA | |
| | | ATGACCCCGTATCTCAAAGAGATTATTCCACTCGAGGTGGAAGATCTGCTGAAC | |
| | | GGTGACGTGCCATACTTCTACACCCTGCCGGAAGAACGCGCCCTGTATCAGGAA | |
| | | GCGTCTGCGATCAATAGTACGTTCTTTACCACTTCGATTTTCCATAAGATTGAC | |
| | | CAGAAAATCGATAAGCTGGGTATCGAGGACCATACCCAGCAAATGAAGATCTTA | |
| | | CACATGAGTATGCTTGCCTCTAACGCTAACCATTACGCCGATGTTGCCGACTTG | |
| | | GATATTCAGAAAGGACACACCATTAAAAACGAACAGTACGTTGAGATGGCCAAA | |
| | | GACATCGGTGATTACCTGATGGAGTTATCGGTCGAGGGTGAAAATCAAGGGGAA | |
| | | CCAGATCTGTGTTGGATTTCGACCGTCCTGGAAGGGAGCTCTGAAATCATTTGG | |
| | | GACATCAGCCCAGTGGGCGAAGATTTATACAACGGCAGCGCTGGCGTCGCTCTC | |
| | | TTTTATGCGTACCTGTTCAAAATTACAGGTGAAAAGCGTTACCAAGAGATCGCA | |
| | | TACAAAGCCCTGGTTCCGGTTCGCCGCAGTGTGGCCCAATTCCAGCACCATCCG | |
| | | AATTGGAGCATTGGTGCGTTTAACGGAGCGTCAGGCTATCTGTACGCGATGGGT | |
| | | ACGATAGCGGCCCTGTTTAATGATGAACGTTTGAAGCATGAAGTAACCCGCAGC | |
| | | ATTCCGCACATTGAACCGATGATCCACGAGGATAAGATCTATGATTTCATTGGC | |
| | | GGTTCCGCAGGGGCGCTGAAGGTGTTCCTGAGCCTGTCGGGGCTGTTTGACGAG | |
| | | CCGAAGTTTTTGGAACTTGCCATTGCATGCAGCGAACATCTGATGAAAAACGCC | |
| | | ATTAAAACGGATCAAGGTATCGGCTGGAAACCACCGTGGGAGGTCACCCCACTG | |
| | | ACCGGTTTCAGCCATGGGGTTAGCGGCGTCATGGCATCCTTCATCGAACTGTAC | |
| | | CAGCAAACCGGTGATGAGCGCTTGCTCAGTTACATTGATCAGAGTTTAGCCTAT | |
| | | GAACGTTCCTTCTTCAGCGAACAAGAGGAGAACTGGCTGACTCCGAACAAAGAA | |
| | | ACACCCGTGGTAGCTTGGTGCCACGGCGCGCCGGGAATTTTGGTATCACGACTG | |
| | | CTTCTGAAGAAATGCGGCTATTTGGATGAAAAAGTCGAAAAAGAAATTGAGGTG | |
| | | GCATTATCCACAACTATCCGTAAAGGCCTTGGTAACAATCGCAGTCTTTGCCAT | |
| | | GGTGATTTCGGCCAGCTGGAAATTCTTCGCTTTGCGGCGGAAGTGTTAGGCGAT | |
| | | AGCTATCTCCAGGAAGTTGTCAACAATCTGTCCGGCGAGTTGTATAATCTTTTC | |
| | | AAAACGGAGGGATATCAGAGCGGAACCAGCCGCGGTACTGAATCCGTGGGCCTG | |
| | | ATGGTAGGTCTGTCCGGGTTTGGGTATGGTTTACTTTCAGCGGCATATCCATCT | |
| | | GCTGTCCCCTCAATCTTAACATTGGATGGTGAGATCCAGAAGTACCGGGAGCCT | |
| | | CATGAAGCCTGA | |
| pEG7173 | HalM2 | [chemical structure] | 667 |
| | | TCAGTGCCGACGACGCTGCCGCATACTAACGACACCGATTGGCTCGAGCAATTA | |
| | | CATGACATTTTGTCCATTCCTGTTACGGAAGAAATCCAGAAATATTTCCACGCC | |
| | | GAAAATGATCTGTTCTCGTTTTTCTATACACCGTTCCTGCAGTTTACGTACCAG | |
| | | AGCATGTCGGACTACTTTATGACCTTCAAGACCGATATGGCCCTGATCGAAAGA | |
| | | CAGAGCCTCCTGCAAAGCACGCTGACCGCGGTACATCACCGACTCTTCCACTTA | |
| | | ACGCATCGCACCCTTATTAGTGAAATGCATATTGATAAACTTACCGTTGGCCTG | |
| | | AATGGCTCTACGCCGCACGAGCGCTACATGGATTTCAACCACAAATTCAACAAA | |
| | | ACCTCGAAGTCGAAGAACCTGTTTAACATCTACCCAATTTTGGGAAAATTGGTC | |
| | | GTTAACGAAACTCTGCGCACTATTAACTTCGTCAAGAAAATCATTCAGCACTAC | |
| | | ATGAAGGACTACCTGCTCCTGTCGGACTTCTTCAAAGAGAAGGACTTGCGTCTT | |
| | | ACCAACCTGCAATTAGGCGTGGGGGATACACACGTTAATGGGCAATGCGTCACC | |
| | | ATTCTGACGTTTGCATCAGGCCAAAAAGTGGTATACAAACCTAGATCATTGTCG | |
| | | ATAGATAAACAGTTCGGAGAATTCATCGAGTGGGTAAACTCGAAAGGTTTTCAG | |
| | | CCTTCCTTGCGTATCCCTATTGCGATTGATCGTCAAACCTATGGTTGGTATGAA | |
| | | TTCATCCCTCATCAAGAGGCCACCAGCGAAGATGAAATAGAACGCTACTATTCT | |
| | | CGCATCGGTGGTTATCTGGCGATCGCCTACTTGTTCGGGGCAACCGACCTGCAC | |
| | | CTGGATAACCTGATCGCCTGCGGCGAACATCCGATGCTTATTGATTTGGAAACA | |
| | | CTCTTTACCAACGATCTCGACTGCTATGACAGTGCGTTTCCGTTCCCGGCGCTG | |
| | | GCCCGCGAATTAACCCAATCCGTTTTTGGCACCCTTATGCTTCCCATCACCATC | |
| | | GCGTCGGGGAAACTGCTGGATATAGACCTGTCAGCAGTAGGAGGCGGTAAAGGT | |
| | | GTGCAGTCCGAAAAGATCAAAACCTGGGTCATCGTGAATCAGAAAACTGATGAG | |
| | | ATGAAGCTGGTCGAGCAGCCGTATGTTACCGAGAGTTCCCAGAATAAACCAACA | |
| | | GTTAATGGGAAAGAGGCGAACATTGGCAATTATATTCCTCATGTCACAGATGGC | |
| | | TTTCGTAAAATGTACCGCCTGTTTCTGAATGAAATTGATGAGTTAATGGATCAT | |
| | | AACGGGCCAATCTTTGCGTTTGAGAGTTGTCAGATTCGTCATGTTTTTCGAGCT | |
| | | ACCCACGTGTATGCGAAATTTTTGGAGGCAAGTACCCACCCAGATTACTTGCAA | |
| | | GAACCTACCAGACGTAATAAACTGTTCGAGTCCTTTTGGAACATCACGTCGCTG | |
| | | ATGGCACCGTTCAAGAAAATTGTACCGCACGAAATCGCGGAGTTGGAGAACCAT | |
| | | GATATTCCGTACTTCGTCCTGACTTGTGGCGGCACCATTGTTAAAGATGGATAC | |
| | | GGCCGGGATATCGCAGACCTGTTTCAAAGTAGCTGCATCGAACGTGTAACTCAT | |
| | | CGTCTGCAGCAGCTGGGAAGCGAGGATGAGGCGCGTCAAATTCGCTACATTAAA | |
| | | AGCAGCCTGGCGACGTTGACCAACGGTGATTGGACCCCATCCCATGAGAAAACC | |
| | | CCGATGTCTCCGGCCTCGGCCGACCGTGAAGATGGTTACTTCCTGCGCGAGGCT | |
| | | CAGGCCATCGGCGACGACATTTTGGCGCAGCTGATTTGGGAGGATGACCGTCAC | |
| | | GCCGCTTACCTTATTGGCGTAAGCGTGGGCATGAACGAAGCCGTCACTGTGTCA | |
| | | CCCCTGACGCCTGGCATCTACGACGGCACACTTGGCATAGTGCTGTTCTTCGAT | |
| | | CAGCTGGCCCAGCAGACCGGCGAAACCCATTATCGCCACGCCGCCGACGCTTTA | |
| | | CTGGAAGGAATGTTCAAACAGCTGAAACCTGAACTGATGCCGTCTAGCGCTTAC | |
| | | TTCGGACTGGGTAGCCTGTTCTATGGCCTGATGGTGTTGGGCCTCCAGCGTTCC | |
| | | GACTCGCATATCATTCAGAAAGCGTATGAGTATCTGAAACATTTGGAAGAGTGT | |
| | | GTGCAGCATGAGGAAACGCCAGATTTTGTCTCGGGTTTGTCTGGTGTACTGTAT | |
| | | ATGCTCACGAAAATTTATCAGCTCACGAATGAACCGAGAGTTTTCGAAGTGGCC | |
| | | AAAACCACAGCTTCGCGTCTGTCTGTGCTGCTTGACAGCAAGCAGCCCGACACT | |
| | | GTGCTCACCGGGTTATCCCATGGCGCCGCAGGATTCGCCCTTGCATTACTGACC | |
| | | TACGGAACCGCTGCAAATGATGAACAGTTGCTGAAACAGGGCCACTCCTATCTG | |
| | | GTGTACGAACGTAATCGGTTTAACAAACAGGAAAACAACTGGGTTGATTTACGT | |
| | | AAAGGCAACGCGTATCAAACATTTTGGTGCCATGGCGCCCCGGGTATTGGCATC | |
| | | TCACGCCTCCTGTTAGCGCAATTTTACGATGACGAACTGCTGCATGAAGAGTTA | |
| | | AACGCAGCACTGAACAAGACTATTTCGGACGGCTTCGGCCACAATCACTCACTG | |
| | | TGTCATGGCGATTTCGGCAACCTCGATCTGTTATTGCTTTATGCCCAATATACG | |
| | | AATAACCCAGAACCAAAGGAACTCGCTCGCAAACTGGCCATAAGCAGTATCGAT | |
| | | CAAGCGCACACGTATGGCTGGAAACTCGGGCTCAATCATAGCGATCAACTGCAG | |
| | | GGTATGATGTTAGGGGTGACTGGTATCGGCTATCAGCTCCTTCGTCATATAAAT | |
| | | CCGACAGTCCCCAGCATTTTGGCACTGGAACTGCCCAGCTCCACGTTAACTGAA | |
| | | AAAGAGCTGAGAATCCATGATCGTTGATAA | |
| bEG_S9 | Cym Mod | AACACCCCTTGTATTACTGTTTATGTAAGCAGACAGTTTTATTGTTCATGATGA | 668 |
| | Backbone | TATATTTTTATCTTGTGCAATGTACATCAGAGATTTTGAGACACAACCAATTAT | |
| | | TGAAGGCCTCCCTAACGGGGGGCCTTTTTTTGTTTCTGGTCTCCCAAGCGCTTA | |
| | | ACGATCGTTGGCTGaacaaacagacaatctggtctgtttgtattatggaaaatt | |
| | | tttctgtataatagattcaacaaacagacaatctggtctgtttgtattatCAGC | |
| | | GGTCAACGCATGTGCTTTGCGTTCTGATGAGACAGTGATGTCGAAACCGCCTCT | |
| | | [chemical structure] | |
| | | GGAGAAGAACTTTTCACTGGAGTTGTCCCAATTCTTGTTGAATTAGATGGTGAT | |
| | | GTTAATGGGCACAAATTTTCTGTCCGTGGAGAGGGTGAAGGTGATGCTACAAAC | |
| | | GGAAAACTCACCCTTAAATTTATTTGCACTACTGGAAAACTACCTGTTCCGTGG | |
| | | CCAACACTTGTCACTACTCTGACCTATGGTGTTCAATGCTTTTCCCGTTATCCG | |
| | | GATCACATGAAACGGCATGACTTTTTCAAGAGTGCCATGCCCGAAGGTTATGTA | |
| | | CAGGAACGCACTATATCTTTCAAAGATGACGGGACCTACAAGACGCGTGCTGAA | |
| | | GTCAAGTTTGAAGGTGATACCCTTGTTAATCGTATCGAGTTAAAGGGTATTGAT | |
| | | TTTAAAGAAGATGGAAACATTCTTGGACACAAACTCGAGTACAACTTTAACTCA | |
| | | CACAATGTATACATCACGGCAGACAAACAAAAGAATGGAATCAAAGCTAACTTC | |
| | | AAAATTCGCCACAACGTTGAAGATGGTTCCGTTCAACTAGCAGACCATTATCAA | |
| | | CAAAATACTCCAATTGGCGATGGCCCTGTCCTTTTACCAGACAACCATTACCTG | |
| | | TCGACACAATCTGTCCTTTCGAAAGATCCCAACGAAAAGCGTGACCACATGGTC | |
| | | CTTCTTGAGTTTGTAACTGCTGCTGGGATTACACATGGCATGGATGAGCTCTAC | |
| | | AAATAATGAAGAGCGCAGAGGTGGTTGTGTTGCGAAAAAAAAAAAAAACACCCT | |
| | | AACGGGTGTTTTTTTTTTTTTGGTGTCCCCACGTGTGGCGCTGGAGACCGTCCA | |
| | | ATGgcggcgcgccatcgaatggtgcaaaacctttcgcggtatggcatgatagcg | |
| | | [chemical structure] | |
| | | GGCAGAACGTGCAATGGAAACCCAGGGTAAACTGATTGCAGCAGCACTGGGTGT | |
| | | TCTGCGTGAAAAAGGTTATGCAGGTTTTCGTATTGCAGATGTTCCGGGTGCAGC | |
| | | CGGTGTTAGCCGTGGTGCACAGAGCCATCATTTTCCGACCAAACTGGAACTGCT | |
| | | GCTGGCAACCTTTGAATGGCTGTATGAGCAGATTACCGAACGTAGCCGTGCACG | |
| | | TCTGGCAAAACTGAAACCGGAAGATGATGTTATTCAGCAGATGCTGGATGATGC | |
| | | AGCAGATTTTTTTCTGGATGATGATTTTAGCATCGGCCTGGATCTGATTGTTGC | |
| | | AGCAGATCGTGATCCGGCACTGCGTGAAGGTATTCTGCGTACCGTTGAACGTAA | |
| | | TCGTTTTGTTGTTGAAGATATGTGGCTGGGTGTGCTGGTGAGCCGTGGTCTGAG | |
| | | CCGTGATGATGCCGAAGATATTCTGTGGCTGATTTTTAACAGCGTTCGTGGTCT | |
| | | GACAGTTCGTAGCCTGTGGCAGAAAGATAAAGAACGTTTTGAACGTGTGCGTAA | |
| | | TAGCACCCTGGAAATTGCACGTGAACGTTATGCAAAATTCAAACGTTGATAAGG | |
| | | ATCCTAATTGGTAACGAATCAGACAATTGACGGCTCGAGGGAGTAGCATAGGGT | |
| | | TTGCAGAATCCCTGCTTCGTCCATTTGACAGGCACATTATGCATCGATGATAAG | |
| | | CTGTCAAACATGAGCAGATCCTCTACGCCGGACGCATCGTGGCCGGCATCACCG | |
| | | GCGCCACAGGTGCGGTTGCTGGCGCCTATATCGCCGACATCACCGATGGGGAAG | |
| | | ATCGGGCTCGCCACTTCGGGCTCATGAGCAAATATTTTATCTGAGGTGCTTCCT | |
| | | CGCTCACTGACTCGCTGCACGAGGCAGACCTCAGCGCTAGCGGAGTGTATACTG | |
| | | GCTTACTATGTTGGCACTGATGAGGGTGTCAGTGAAGTGCTTCATGTGGCAGGA | |
| | | GAAAAAAGGCTGCACCGGTGCGTCAGCAGAATATGTGATACAGGATATATTCCG | |
| | | CTTCCTCGCTCACTGACTCGCTACGCTCGGTCGTTCGACTGCGGCGAGCGGAAA | |
| | | TGGCTTACGAACGGGGCGGAGATTTCCTGGAAGATGCCAGGAAGATACTTAACA | |
| | | GGGAAGTGAGAGGGCCGCGGCAAAGCCGTTTTTCCATAGGCTCCGCCCCCCTGA | |
| | | CAAGCATCACGAAATCTGACGCTCAAATCAGTGGTGGCGAAACCCGACAGGACT | |
| | | ATAAAGATACCAGGCGTTTCCCCTGGCGGCTCCCTCGTGCGCTCTCCTGTTCCT | |
| | | GCCTTTCGGTTTACCGGTGTCATTCCGCTGTTATGGCCGCGTTTGTCTCATTCC | |
| | | ACGCCTGACACTCAGTTCCGGGTAGGCAGTTCGCTCCAAGCTGGACTGTATGCA | |
| | | CGAACCCCCCGTTCAGTCCGACCGCTGCGCCTTATCCGGTAACTATCGTCTTGA | |
| | | GTCCAACCCGGAAAGACATGCAAAAGCACCACTGGCAGCAGCCACTGGTAATTG | |
| | | ATTTAGAGGAGTTAGTCTTGAAGTCATGCGCCGGTTAAGGCTAAACTGAAAGGA | |
| | | CAAGTTTTGGTGACTGCGCTCCTCCAAGCCAGTTACCTCGGTTCAAAGAGTTGG | |
| | | TAGCTCAGAGAACCTTCGAAAAACCGCCCTGCAAGGCGGTTTTTTCGTTTTCAG | |
| | | AGCAAGAGATTACGCGCAGACCAAAACGATCTCAAGAAGATCATCTTATTAAGG | |
| | | GGTCTGACGCTCAGTGGAACGAAAAATCAATCTAAAGTATATATGAGTAAACTT | |
| | | GGTCTGACAGTTACCTTAGAAAAACTCATCGAGCATCAAATGAAACTGCAATTT | |
| | | ATTCATATCAGGATTATCAATACCATATTTTTGAAAAAGCCGTTTCTGTAATGA | |
| | | AGGAGAAAACTCACCGAGGCAGTTCCATAGGATGGCAAGATCCTGGTATCGGTC | |
| | | TGCGATTCCGACTCGTCCAACATCAATACAACCTATTAATTTCCCCTCGTCAAA | |
| | | AATAAGGTTATCAAGTGAGAAATCACCATGAGTGACGACTGAATCCGGTGAGAA | |
| | | TGGCAAAAGCTTATGCATTTCTTTCCAGACTTGTTCAACAGGCCAGCCATTACG | |
| | | CTCGTCATCAAAATCACTCGCATCAACCAAACCGTTATTCATTCGTGATTGCGC | |
| | | CTGAGCGAGACGAAATACGCGATCGCTGTTAAAAGGACAATTACAAACAGGAAT | |
| | | CGAATGCAACCGGCGCAGGAACACTGCCAGCGCATCAACAATATTTTCACCTGA | |
| | | ATCAGGATATTCTTCTAATACCTGGAATGCTGTTTTCCCGGGGATCGCAGTGGT | |
| | | GAGTAACCATGCATCATCAGGAGTACGGATAAAATGCTTGATGGTCGGAAGAGG | |
| | | CATAAATTCCGTCAGCCAGTTTAGTCTGACCATCTCATCTGTAACATCATTGGC | |
| | | AACGCTACCTTTGCCATGTTTCAGAAACAACTCTGGCGCATCGGGCTTCCCATA | |
| | | CAATCGATAGATTGTCGCACCTGATTGCCCGACATTATCGCGAGCCCATTTATA | |
| | | CCCATATAAATCAGCATCCATGTTGGAATTTAATCGCGGCCTCGAGCAAGACGT | |
| | | TTCCCGTTGAATATGGCTCAT | |
| pEG7034 | TruD | [chemical structure] | 669 |
| | | AATTAAGCCCCACTTCCACGTTGAGATAATTGAGCCGAAGCAAGTGTATCTCCT | |
| | | GGGCGAACAGGGCAACCACGCTCTCACCGGGCAGCTCTACTGCCAAATTCTGCC | |
| | | TTTCTTAAACGGCGAATACACCCGAGAACAAATTGTGGAAAAGCTCGATGGGCA | |
| | | GGTCCCGGAGGAATATATCGACTTCGTACTCAGTCGTCTGGTGGAGAAGGGCTA | |
| | | TCTAACTGAGGTGGCTCCAGAACTATCCCTGGAAGTGGCAGCATTTTGGAGCGA | |
| | | ATTGGGAATTGCCCCTTCTGTAGTGGCAGAAGGGCTAAAGCAGCCAGTGACAGT | |
| | | GACAACGGCGGGCAAGGGCATTAGGGAAGGGATAGTGGCTAACCTGGCAGCAGC | |
| | | GCTGGAGGAAGCTGGCATTCAGGTGTCAGACCCAAGGGACCCAAAGGCCCCAAA | |
| | | GGCAGGGGATTCTACTGCCCAGCTTCAGGTGGTGCTGACCGATGACTATTTACA | |
| | | GCCGGAACTTGCAGCGATCAACAAGGAAGCCTTAGAGCGCCAACAACCCTGGTT | |
| | | GCTGGTTAAGCCTGTGGGCAGTATCCTCTGGTTGGGACCGTTGTTCGTTCCTGG | |
| | | GGAAACCGGATGTTGGCACTGTCTTGCTCAACGATTGCAAGGCAACCGGGAAGT | |
| | | TGAAGCATCGGTATTGCAACAAAAGCGAGCGCTGCAGGAGCGCAACGGTCAAAA | |
| | | TAAAAATGGTGCAGTGAGTTGCTTGCCCACAGCACGGGCAACCCTACCTTCTAC | |
| | | TCTACAAACAGGTTTACAGTGGGCTGCCACTGAGATTGCTAAGTGGATGGTCAA | |
| | | GCGGCACCTCAATGCCATAGCACCGGGAACGGCTCGTTTTCCCACTCTAGCTGG | |
| | | CAAGATATTTACATTCAACCAGACGACTCTGGAGTTGAAAGCTCATCCTCTGAG | |
| | | CCGACGACCGCAATGTCCCACCTGTGGCGATCGGGAAACTCTCCAACGGCGCGG | |
| | | GTTTGAACCACTGAAGCTAGAGTCGCGCCCCAAACACTTCACCTCCGATGGCGG | |
| | | TCATCGCGCCATGACCCCAGAACAAACGGTGCAGAAGTACCAACACCTCATCGG | |
| | | GCCCATAACGGGGGTAGTGACGGAACTGGTGCGAATTTCTGACCCTGCCAATCC | |
| | | CTTGGTGCATACCTACCGGGCTGGGCATAGCTTTGGCAGTGCTACGTCTCTGCG | |
| | | GGGGCTGCGCAATGTCCTACGCCACAAGAGTTCTGGTAAAGGCAAGACCGATAG | |
| | | CCAATCTCGGGCCAGCGGACTTTGCGAGGCGATCGAGCGCTATTCGGGCATTTT | |
| | | TCAGGGAGACGAACCCCGCAAGCGGGCAACTTTGGCTGAGTTGGGAGATTTGGC | |
| | | GATTCATCCAGAACAGTGTTTGCACTTTAGCGACAGGCAGTATGACAACCGGGA | |
| | | AAGCTCGAACGAGCGAGCAACAGTGACTCACGACTGGATTCCCCAACGGTTCGA | |
| | | TGCAAGTAAGGCTCACGACTGGACTCCCGTGTGGTCCCTAACGGAGCAAACCCA | |
| | | TAAGTATCTGCCTACAGCCCTGTGCTATTACCGATACCCCTTCCCCCCAGAACA | |
| | | CCGTTTCTGCCGTAGTGACTCCAACGGAAACGCGGCGGGAAATACCCTGGAAGA | |
| | | GGCGATTTTGCAAGGATTTATGGAACTGGTGGAACGGGATAGCGTGTGCCTGTG | |
| | | GTGGTACAATCGCGTTAGCCGTCCGGCTGTGGATTTGAGTAGCTTTGACGAGCC | |
| | | TTATTTTTTGCAGTTGCAGCAGTTCTATCAAACTCAAAATCGCGATCTGTGGGT | |
| | | ACTGGATTTAACAGCAGATTTGGGCATTCCGGCTTTTGTAGGGGTATCGAATCG | |
| | | GAAAGCCGGCAGCTCGGAAAGAATAATTCTCGGCTTTGGAGCGCACCTGGACCC | |
| | | GACAGTTGCCATCCTTCGCGCTCTTACGGAGGTCAACCAAATAGGCTTGGAATT | |
| | | GGATAAAGTTTCTGATGAGAGCCTCAAGAACGATGCCACGGATTGGTTAGTGAA | |
| | | TGCTACATTGGCAGCTAGTCCCTATCTCGTTGCCGATGCTAGCCAACCCCTCAA | |
| | | GACTGCGAAGGATTATCCCCGGCGTTGGAGTGACGATATTTACACCGATGTGAT | |
| | | GACTTGTGTAGAAATAGCCAAGCAAGCAGGTCTAGAGACTTTGGTACTGGATCA | |
| | | GACCAGACCCGACATAGGTTTAAATGTGGTTAAAGTCATTGTGCCAGGAATGCG | |
| | | TTTTTGGTCGCGATTTGGCTCCGGTCGGCTCTATGACGTGCCAGTGAAGTTGGG | |
| | | ATGGCGAGAGCAACCACTTGCTGAGGCACAAATGAACCCTACACCGATGCCATT | |
| | | TTAATAA | |
| pEG7035 | AlbA | [chemical structure] | 670 |
| | | ATTTATTAATGAAAGTGTAAGAGTTCACCAGCTTCCTGAGGGCGGCGTGTTAGA | |
| | | AATCGACTACTTGCGCGATAATGTCTCCATTTCTGACTTTGAGTATTTGGATCT | |
| | | CAACAAAACGGCTTACGAGCTCTGCATGCGCATGGATGGCCAAAAAACAGCTGA | |
| | | GCAGATTTTAGCTGAGCAATGTGCAGTGTATGATGAATCACCGGAAGATCATAA | |
| | | AGATTGGTATTACGACATGCTCAACATGCTCCAGAACAAGCAGGTTATTCAGCT | |
| | | TGGAAACCGGGCCAGCCGCCATACAATCACCACGAGCGGAAGCAATGAATTTCC | |
| | | GATGCCCCTGCACGCCACCTTTGAACTGACGCACCGCTGTAATTTGAAATGCGC | |
| | | CCACTGTTATTTGGAAAGCTCACCTGAAGCGCTCGGCACCGTGTCGATTGAGCA | |
| | | ATTCAAAAAAACGGCTGATATGCTGTTTGATAACGGTGTATTGACATGCGAAAT | |
| | | CACAGGTGGAGAAATTTTTGTCCATCCAAACGCCAATGAGATTCTTGACTATGT | |
| | | GTGTAAAAAGTTCAAAAAAGTCGCTGTCTTAACAAACGGAACACTCATGCGAAA | |
| | | AGAGAGCCTGGAGCTTTTGAAAACTTACAAGCAAAAAATCATCGTCGGCATTTC | |
| | | TCTAGATAGTGTCAATTCCGAGGTCCATGACTCCTTTAGAGGGAGAAAAGGCTC | |
| | | TTTTGCCCAAACTTGTAAAACGATAAAATTGTTGAGTGACCACGGTATATTTGT | |
| | | CAGAGTCGCTATGTCTGTATTCGAAAAAAACATGTGGGAAATCCACGATATGGC | |
| | | CCAAAAGGTTCGGGATCTCGGGGCGAAGGCGTTTTCTTACAATTGGGTTGACGA | |
| | | TTTCGGAAGAGGCAGGGATATTGTCCATCCAACGAAAGACGCCGAGCAGCACCG | |
| | | CAAGTTTATGGAATACGAGCAACATGTGATTGATGAGTTTAAAGATCTGATTCC | |
| | | GATTATTCCCTATGAGAGAAAACGCGCGGCAAATTGCGGCGCTGGCTGGAAGTC | |
| | | CATTGTGATCAGTCCGTTCGGCGAAGTACGTCCTTGCGCCCTCTTTCCAAAGGA | |
| | | ATTTTCATTGGGAAATATTTTTCATGATTCCTATGAAAGCATCTTTAACTCCCC | |
| | | TCTCGTCCATAAACTGTGGCAAGCGCAAGCGCCGCGGTTCAGCGAACATTGCAT | |
| | | GAAAGACAAATGCCCGTTCAGCGGCTATTGCGGAGGCTGTTACTTAAAAGGGCT | |
| | | GAACTCTAACAAATATCACCGGAAAAACATTTGCTCTTGGGCGAAAAATGAACA | |
| | | ATTAGAAGATGTGGTCCAGCTTATTTAGTAA | |
| pEG7037 | MdnC | [chemical structure] | 671 |
| | | CTTTTAGCCACGATAATGAAAGTATTCCTCTGGTAATCAAAGCCATAGAAGCCA | |
| | | TGGGTAAAAAAGCCTTCCGTTTTGATACTGATCGCTTCCCTACAGAGGTGAAAG | |
| | | TTGATCTTTACTCAGGCGGTCAAAAAGGCGGAATTATTACCGATGGAGAACAAA | |
| | | AATTAGAGCTAAAAGAAGTTTCTTCTGTCTGGTATCGACGCATGAGATACGGAC | |
| | | TAAAATTACCCGATGGGATGGATAGTCAATTTCGCGAAGCTTCTCTTAAGGAAT | |
| | | GTCGGTTAAGTATTCGAGGAATGATTGCTAGTTTATCTGGCTTTCATCTTGATC | |
| | | CAATTGCTAAGGTAGATCATGCTAATCATAAACAATTGCAGTTACAAGTGGCGC | |
| | | AACAATTAGGTTTATTAATTCCGGGGACTTTAACTTCTAATAATCCTGAAGCTG | |
| | | TCAAGCAATTTGCTCGGGAGTTTGAAGCGACGGGAATTGTGACTAAAATGCTTT | |
| | | CTCAATTTGCTATTTATGGAGACAAGCAAGAGGAAATGGTTGTTTTTACCAGTC | |
| | | CTGTTACAAAGGAAGATCTAGATAATTTGGAAGGTTTGCAATTTTGTCCAATGA | |
| | | CTTTTCAGGAAAACATTCCTAAAGCTTTGGAATTACGCATCACTATCGTCGGTG | |
| | | AACAAATATTTACGGCGGCGATTAATTCCCAACAATTAGACGGTGCTATCTACG | |
| | | ATTGGCGAAAAGAGGGACGCGCGCTCCATCAACAATGGCAACCCTACGATTTAC | |
| | | CGAAAACTATTGAAAAACAACTACTAGAATTAGTGAAATATTTCGGTCTTAATT | |
| | | ATGGTGCAATTGATATGATTGTCACACCAGATGAACGTTATATCTTTTTAGAAA | |
| | | TTAATCCCGTTGGCGAGTTTTTCTGGCTAGAACTTTATCCTCCTTATTTTCCTA | |
| | | TCTCCCAGGCGATCGCTGAAATCCTAGTTAACTCATAATAA | |
| pEG7043 | ProcM | [chemical structure] | 672 |
| | | GAAAACATCGTGGCTGGCCGCCATCGCTCCGGATGAACCCCACAAATTCGACCG | |
| | | CCGCTTAGAATGGGACGAGCTTTCAGAGGAGAACTTCTTCGCAGCACTGAACTC | |
| | | AGAACCTGCATCGTTGGAAGAGGATGATCCATGTTTTGAAGAAGCACTGCAAGA | |
| | | CGCCCTGGAGGCCTTGAAGGCAGCATGGGATTTACCCCTTCTTCCCGTCGATAA | |
| | | TAATCTTAATCGTCCCTTCGTAGATGTCTGGTGGCCCATTCGCTGTCACTCTGC | |
| | | GGAGAGCTTGCGTCAAAGCTTCGTCAGTGATAGTGCTGGACTTGCGGACGAGAT | |
| | | TTTTGATCAGCTGGCCGATTCGTTACTGGACCGTCTGTGCGCCCTGGGAGATCA | |
| | | GGTGTTGTGGGAGGCGTTTAACAAGGAGCGTACACCAGGAACGATGTTGTTAGC | |
| | | CCACTTAGGAGCCGCAGGCGACGGCTCCGGACCCCCTGTACGTGAGCATTACGA | |
| | | ACGTTTTATTCAGTCTCACCGCCGTAATGGATTAGCGCCTTTGCTTAAGGAATT | |
| | | CCCTGTACTGGGCCGCCTTATTGGAACAGTTTTGTCCCTTTGGTTCCAAGGGAG | |
| | | CGTGGAAATGCTGCAACGTATCTGCGCTGACCGCACCGTTCTGCAACAGTGTTT | |
| | | CGCTATCCCTTGCGGGCATCACCTGAAAACTGTAAAGCAGGGACTTTCTGATCC | |
| | | ACACCGCGGCGGTCGCGCTGTGGCAGTTTTGGAATTTGCGGACCCAAATTCCAC | |
| | | CGCTAATTCAAGTATGCACGTAGTGTATAAACCGAAGGATATGGCTGTGGATGC | |
| | | AGCTTACCAGGCCACCTTAGCAGATCTTAATACTCATAGCGACCTTTCCCCGTT | |
| | | GCGCACGCTTGCCATTCATAACGGCAACGGATATGGTTACATGGAACATGTGGT | |
| | | TCACCATCTTTGCGCTAACGACAAAGAGCTGACAAATTTCTATTTCAACGCTGG | |
| | | GCGTTTAACCGCGCTTCTGCATCTTCTTGGATGTACTGACTGTCACCATGAAAA | |
| | | TTTGATTGCATGTGGTGATCAATTACTGTTGATCGATACAGAAACATTATTGGA | |
| | | GGCGGATTTACCCGATCACATTTCGGATGCTTCGAGCACCACGGCGCAACCAAA | |
| | | GCCTAGTAGCCTTCAAAAGCAATTTCAGCGTTCTGTTTTGCGTAGCGGGTTACT | |
| | | TCCTCAATGGATGTTCCTGGGGGAGTCGAAGTTGGCCATCGACATCTCGGCTCT | |
| | | GGGAATGTCCCCACCCAATAAGCCTGAGCGTATTGCACTTGGCTGGTTAGGATT | |
| | | CAATTCTGACGGGATGATGCCTGGGCGTGTATCCCAACCAGTTGAGATTCCTAC | |
| | | ATCCTTGCCCGTTGGGATTGGTGAGGTTAATCCCTTTGATCGTTTTTTAGAGGA | |
| | | TTTTTGTGATGGCTTTTCCATGCAATCAGAGGCCCTTATTAAGCTTCGCAACCG | |
| | | TTGGCTGGACGTTAATGGGGTTCTTGCTCATTTCGCGGGTCTGCCCCGCCGTAT | |
| | | CGTTCTTCGCGCGACTCGCGTATACTTCACTATCCAGCGTCAGCAGTTAGAGCC | |
| | | TACGGCACTGCGCTCTCCACTTGCACAGGCCTTGAAACTTGAGCAGCTTACTCG | |
| | | TTCTTTCTTGTTGGCAGAGTCAAAGCCTCTTCACTGGCCCATTTTCGCAGCTGA | |
| | | AGTAAAGCAGATGCAGCACCTTGACATTCCTTTCTTCACACACTTAATCGACGC | |
| | | TGACGCTCTGCAGCTGGGCGGCCTGGAACAAGAATTACCAGGCTTCATCCAGAC | |
| | | TAGTGGCTTGGCAGCTGCTTACGAGCGTTTGCGTAATTTAGATACGGACGAGAT | |
| | | TGCTTTCCAACTTCGTCTGATCCGCGGTGCAGTAGAGGCTCGCGAGTTGCATAC | |
| | | TACGCCGGAGTCGAGCCCGACGTTGCCGCCGCCTGCCACCCCCGAGGCTCTTAT | |
| | | GTCCTCTTCAGCCGAGACTAGTTTAGAAGCTGCTAAGCGCATCGCTCACCGCTT | |
| | | ACTGGAGTTGGCAATTCGTGATTCTCAAGGGCAAGTAGAATGGCTGGGCATGGA | |
| | | TCTGGGGGCAGATGGAGAGAGCTTCTCCTTTGGCCCAGTTGGCTTGAGCCTTTA | |
| | | TGGGGGCTCAATCGGTATCGCTCACCTTCTGCAACGTTTGCAGGCGCAGCAAGT | |
| | | TTCCTTGATGGACGCAGACGCTATCCAAACGGCAATTTTACAGCCCCTTGTGGG | |
| | | ACTGGTTGATCAACCTAGCGACGACGGACGTCGCCGTTGGTGGCGTGATCAGCC | |
| | | GCTGGGCTTAAGTGGATGTGGCGGTACCTTGCTTGCACTTACACTTCAAGGTGA | |
| | | ACAAGCGATGGCTAATTCCCTGCTGGCCGCTGCTTTGCCCCGTTTTATCGAGGC | |
| | | TGATCAGCAACTTGACCTGATTGGTGGCTGCGCTGGACTGATCGGTTCGTTGGT | |
| | | ACAATTAGGTACTGAAAGTGCCTTACAATTAGCTTTGCGTGCGGGCGACCATCT | |
| | | TATTGCGCAACAGAATGAAGAGGGGGCGTGGTCTAGCTCGTCATCACAGCCCGG | |
| | | TTTGTTGGGCTTTAGTCATGGTACTGCAGGTTACGCAGCAGCCTTAGCACACTT | |
| | | ACATGCATTTTCCGCTGATGAGCGTTACCGCACCGCAGCCGCTGCCGCTTTAGC | |
| | | ATACGAACGCGCACGTTTTAATAAAGATGCCGGCAACTGGCCAGACTACCGCTC | |
| | | GATCGGACGTGACTCTGATTCAGATGAACCGTCCTTTATGGCTTCCTGGTGTCA | |
| | | CGGCGCACCCGGCATTGCCCTGGGCCGCGCCTGTTTGTGGGGTACGGCGCTTTG | |
| | | GGACGAAGAATGCACCAAGGAGATCGGAATTGGGTTACAGACCACAGCTGCTGT | |
| | | TTCGTCTGTTAGTACTGACCACCTGTGTTGTGGTTCACTTGGCCTTATGGTATT | |
| | | ATTAGAGATGCTGTCAGCAGGACCCTGGCCCATCGACAATCAATTACGTTCCCA | |
| | | TTGCCAGGACGTAGCATTCCAGTACCGCCTGCAGGCTTTGCAGCGCTGTTCAGC | |
| | | CGAGCCGATTAAGCTTCGTTGCTTCGGTACAAAAGAGGGCCTTTTAGTCCTGCC | |
| | | TGGATTTTTCACTGGCTTATCAGGAATGGGTTTAGCACTGCTTGAGGATGATCC | |
| | | ATCTCGCGCCGTGGTTTCTCAACTGATCAGTGCGGGCTTATGGCCGACAGAGTG | |
| | | ATAA | |
| pEG7047 | MibHS | [chemical structure] | 673 |
| | | CTCTGGCACGTCTGTTTGACGTGTTGGGTGACGATGCCGCTGCCGCACGTGAAT | |
| | | GGGTAACGGAACCCCATCGTCTGATCGCTAGCAATGAGCGCCTGGGCACAGCTC | |
| | | CGGAAGCCCCGGCGGATGACGATCCGGAGGCCATTCGGACGGTTGGAGTGATCG | |
| | | GAGGGGGCACAGCCGGGTATTTAACGGCGTTGGCTCTGAAGGCTAAACGCCCTT | |
| | | GGTTGGATGTGGCGCTCGTCGAAAGTGCGGATATCCCGATCATTGGGGTAGGAG | |
| | | AGGCGACGGTGTCTTATATGGTGATGTTTCTGCACCATTATCTGGGCATTGATC | |
| | | CGGCGGAGTTTTACCAACATGTGCGCCCTACTTGGAAACTGGGCATCCGTTTTG | |
| | | AATGGGGGTCACGTCCGGAGGGCTTTGTTGCGCCATTCGATTGGGGGACCGGAT | |
| | | CTGTTGGCCTGGTTGGGAGCCTGCGTGAAACGGGCAATGTCAACGAAGCTACGT | |
| | | TACAGGCGATGCTCATGACGGAGGATCGCGTTCCGGTATATCGTGGCGAAGGTG | |
| | | GGCATGTTAGTCTGATGAAATATCTGCCATTCGCATATCATATGGATAACGCTC | |
| | | GCCTGGTTCGCTACCTGACGGAACTCGCCACTCGTCGTGGCGTGCATCATGTCG | |
| | | ATGCGACTGTAGCTGAAGTTCGCCTGGATGGTCCTGACCACGTTGGGGACCTGA | |
| | | TTACTACGGACGGTCGTCGCCTGCACTATGACTTTTACGTCGATTGTACTGGAT | |
| | | TTCGTTCCCTGCTGCTGGAAAAAGCCCTGGGTATCCCGTTCGAATCTTATGCGT | |
| | | CAAGCCTGTTTACCGACGCGGCAATTACCGGTACCCTTGCACATGGGGGTCATC | |
| | | TTAAACCTTACACTACGGCAACTACCATGAATGCGGGCTGGTGTTGGACGATCC | |
| | | CTACTCCTGAGTCCGATCACCTGGGGTACGTTTTCAGTAGTGCCGCGATCGATC | |
| | | CAGACGATGCAGCAGCAGAAATGGCCCGCCGTTTCCCGGGCGTTACCCGCGAAG | |
| | | CATTAGTTCGCTTTCGCTCCGGCCGTCACCGTGAAGCTTGGCGCGGCAATGTCA | |
| | | TCGCGGTAGGAAACAGCTATGCTTTCGTGGAACCTCTGGAGAGTTCGGGACTCC | |
| | | TGATGATTGCTACCGCAGTCCAGATCCTGGTGAGTTTGCTGCCGAGTAGTCGTC | |
| | | GTGACCCGCTGCCTAGCAATGTGGCGAATCAGGCGTTAGCTCACCGGTGGGACG | |
| | | CGATTCGTTGGTTTCTGAGTATTCATTACCGTTTCAACGGCCGCCTCGATACTC | |
| | | CGTTCTGGAAGGAAGCCCGTGCCGAAACAGATATTAGCGGTATTGAACCGTTGC | |
| | | TTCGTCTGTTCAGTGCCGGTGCCCCTCTGACCGGTCGCGATAGCTTTGCGCGCT | |
| | | ATTTGGCCGACGGAGCAGCCCCGTTGTTCTATGGCCTGGAGGGTGTTGATACCT | |
| | | TACTGCTGGGACAGGAAGTGCCTGCGCGTCTGTTACCACCGCGTGAATCTCCTG | |
| | | AGCAGTGGCGTGCCCGTGCTGCAGCAGCCCGCTCATTAGCCTCGCGTGGCTTAC | |
| | | GTCAGAGCGAAGCTCTGGATGCTTACGCTGCGGACCCCTGTCTCAATGCGGAAC | |
| | | TGCTGTCTGATAGCGACTCATGGGCGGGTGAACGCGTCGCGGTACGTGCAGGTC | |
| | | [chemical structure] | |
| | | GACGACTGGCACCACGGTAGCGCATGCTGTAGAACCAGACGGTTTCCGCGCCGT | |
| | | GATGGCCACACTGCCGGCCGCTGTGGCGATCGTTACGGCAGCTGCGGCAGATGG | |
| | | GCGCCCGTGGGGTATGACCTGCAGTTCGGTTTGCTCAGTGACCTTGACCCCGCC | |
| | | GACCCTTCTGGTCTGCCTTCGGACGGCGTCCCCGACTCTGGCCGCAGTCGTGTC | |
| | | AGGTCGTGCATTTAGCGTGAACCTTCTGTGTGCGCGGGCCTATCCTGTGGCGGA | |
| | | ATTGTTTGCATCTGCGGCAGCAGACCGGTTTGATCGCGTTCGTTGGCGTCGCCC | |
| | | GCCGGGTACAGGCGGTCCACATCTTGCCGATGATGCACGTGCAGTGTTAGACTG | |
| | | TCGCCTGAGCGAAAGCGCAGAAGTAGGCGACCATGTGGTCGTATTTGGCCAAGT | |
| | | CCGGGCGATTCGTCGCCTGAGTGATGAACCACCACTGATGTATGGTTATCGTCG | |
| | | TTACGCACCTTGGCCGGCAGATCGTGGTCCGGGTGCGGCAGGCGGCTAATAA | |
| pEG7048 | MibD | [chemical structure] | 674 |
| | | AGCGACGCAGGAGGTGACCCACGCCCGCCTGAACGCTTACTGTTGGGGGTGTCA | |
| | | GGAAGTGTCGCTGCACTGAACTTACCGGCGTACATTTATGCCTTTCGGGCAGCC | |
| | | GGTGTGGCACGTCTTGCGGTCGTGCTGACACCAGCGGCTGAAGGGTTCCTTCCA | |
| | | GCGGGTGCGTTACGCCCGATTGTGGATGCCGTTCATACGGAACATGACCAAGGC | |
| | | AAAGGTCACGTAGCGCTGTCACGCTGGGCGCAACACTTACTCGTGCTGCCGGCA | |
| | | ACAGCGAATTTGCTTGGCTGTGCAGCGTCAGGACTTGCGCCGAACTTTTTAGCG | |
| | | ACCGTTCTGCTCGCGGCAGATTGCCCAATCACATTCGTCCCGGCGATGAATCCG | |
| | | GTCATGTGGCGTAAACCAGCCGTACGCCGGAACGTTGCAACCTTACGCGCAGAT | |
| | | GGTCATCACGTGGTGGATCCTCTGCCGGGCGCTGTGTACGAAGCTGCCTCACGT | |
| | | TCTATCGTGGAAGGTCTTGCTATGCCGCGCCCTGAAGCGTTAGTCCGTTTACTG | |
| | | GGTGGCGGTGATGACGGTTCTCCAGCAGGACCGGCAGGTCCGGTTGGACGCGCA | |
| | | GAGCATGTTGGGGCTGTTGAGGCTGTTGAAGCCGTGGAAGCAGTTGAGGCCGTT | |
| | | GAGGCTGCGGAAGCACTTGCGTAATAA | |
| pEG7056 | PlpXY | [chemical structure] | 675 |
| | | TCCTACGCAGTGTGGGAAATCACCCTGAAATGCAATCTGGCATGCTCTCATTGT | |
| | | GGCAGCCGCGCCGGCCAAGCCCGTACGAAAGAGCTGAGTACCGAAGAAGCGTTC | |
| | | AACCTGGTCCGCCAGCTGGCCGACGTGGGCATTAAGGAAGTCACCCTGATCGGT | |
| | | GGTGAAGCCTTTATGCGTTCGGATTGGCTGGAAATCGCGAAAGCCGTCACTGAA | |
| | | GCCGGCATGATCTGTGGCATGACCACAGGGGGCTTCGGGGTCAGTCTGGAAACG | |
| | | GCGCGTAAAATGAAAGAAGCGGGCATTAAAACGGTGAGCGTTAGCATTGACGGT | |
| | | GGTATTCCTGAAACCCACGACCGCCAGCGCGGTAAAAAGGGTGCGTGGCATAGT | |
| | | GCATTCCGGACTATGAGCCATCTGAAAGAAGTCGGGATCTACTTCGGTTGCAAC | |
| | | ACTCAAATCAATCGTTTATCGGCGTCAGAATTCCCGATTATCTATGAACGTATT | |
| | | CGCGATGCTGGGGCACGTGCGTGGCAAATTCAGCTGACGGTTCCGATGGGCAAC | |
| | | GCCGCGGATAACGCAGATATGCTGCTGCAACCGTATGAATTGCTCGACATCTAT | |
| | | CCGATGTTAGCCCGCGTTGCCAAACGTGCGAAACAGGAAGGCGTGCGTATTCAG | |
| | | GCAGGTAACAACATCGGGTACTATGGACCGTATGAGCGTCTGCTGCGTGGCAGC | |
| | | GACGAATGGACGTTTTGGCAAGGATGTGGTGCGGGCCTTAACACCCTCGGCATC | |
| | | GAAGCCGACGGCAAAATCAAAGGCTGTCCATCCCTGCCGACCGCCGCGTACACC | |
| | | GGCGGTAACATTCGCGATCGCCCGCTGCGGGAAATCGTCGAACAGACCGAAGAA | |
| | | CTGAAATTTAACTTAAAAGCTGGTACAGAACAAGGTACGGACCATATGTGGGGC | |
| | | TTTTGTAAAACCTGCGAATTCGCGGAACTCTGTCGCGGCGGATGCAGCTGGACT | |
| | | GCGCATGTGTTCTTTGACCGGCGCGGCAATAATCCGTACTGCCACCATCGGGCT | |
| | | CTGAAACAAGCCCAAAAAGACATTCGCGAACGCTTTTATTTAAAAGTGAAAGCA | |
| | | AAGGGCAACCCGTTCGACAATGGTGAATTTGTTATCATTGAAGAACCTTTTAAC | |
| | | GCTCCGTTACCCGAGAATGACCTGCTGCACTTTAACAGTGATCACATTCAATGG | |
| | | [chemical structure] | |
| | | [chemical structure] | |
| | | CGCGGCACAGAAATCTGACGACAGCAGCAGCGTATTACCGCGCCAGGGGTGGCA | |
| | | AGACAAACAAGCCTTTATTAAGGCACTCATTAAAGCCAAACAGTCTCTCGAAAT | |
| | | TGCCGAAATTAGCAACTTTTTAACC | |
| pEG7058 | PbtO | [chemical structure] | 676 |
| | | ATCCCCTGTCGCGTCCAGAACCGCTGGGCGTGCACCCAGATTATCGTCGCCTGC | |
| | | GTGAGACTTGCCCGGTTGCACGTGTGGGTAGCCCGTATGGCCCAGCGTGGCTTG | |
| | | TCACCCGTTACGCCGATGTGGCCGCAGTTCTGACCGATGCCCGTTTTAGTCGTG | |
| | | CAGCCGCTCCGGAAGATGATGGTGGCATCCTGCTGAACACCGATCCGCCGGAAC | |
| | | ATGATCGTCTGCGTAAACTGATTGTAGCACACACAGGCACCGCTCGCGTGGAAC | |
| | | GGCTGCGTCCGCGTGCTGAAGAGATCGCTGTTGCGTTAGCGCGCCGTATCCCGG | |
| | | GCGAAGGCGAATTCATTAGTGCATTTGCCGAGCCCTTCAGCCATCGCGTTTTGT | |
| | | CTTTATTTGTTGGCCATCTTGTTGGGTTACCAGCGCAGGACCTGGGCCCCTTAG | |
| | | CGACCGTAGTGACTCTGGCACCCGTTCCCGACCGCGAACGTGGCGCGGCATTTG | |
| | | CAGAGCTGTGTCGTCGGCTGGGTCGTCAGGTGGATCGCGAAACGCTTGCAGTAG | |
| | | TTTTAAACGTGGTCTTTGGCGGACATGCGGCTGTAGTGGCCGCGCTGGGTTATT | |
| | | GCCTGTTAGCTGCATTAGATGCGCCACTGCCACGTCTGGCCGGTGACCCAGAGG | |
| | | GCATTGCCGAACTGGTGGAAGAAACCCTTCGTTTGGCTCCACCGGGAGATCGTA | |
| | | CACTGTTGCGTCGTACTACAGAACCTGTGGAACTTGGCGGTCGCACATTACCAG | |
| | | CGGGTGCGCTTGTAATCCCGTCCATTGCAGCCGCAAACCGTGATCCGGATCGCC | |
| | | CTGTGGGCCGTCGTATGCCACGTCATCTTGCATTTGGACGTGGAGCGCATGCCT | |
| | | GTTTAGGCATGGCGCTGGCGCGCATGGAACTCCAGGCAGCACTGAAAGCGTTAG | |
| | | CGGAACACGCGCCAGACGTACGGTTGCCGGCTGGTACAGGCGCGCTGGTCCGCA | |
| | | CACACGAAGAACTCTCGGTGAGCCCGCTCGCAGGAATCCCAATTCAACGCTAAT | |
| | | AA | |
| pEG7059 | PbtM1 | [chemical structure] | 677 |
| | | TCGATGAAGCTGCGGTGGCGGCGGACTTACGCGAATTGGCCGCAGCTCTGGATC | |
| | | GCAGTGGTTATGGTGAAATCCTCACCTGTTTTCTGCCTCAGAAGGCACAGGCGC | |
| | | ATATCTGGGCTCAGACCGCTGCAAAAATTGATGGGCCGTTGCGTACCCTGATGG | |
| | | AATTATTCCTTCTGGGTCGGGCGGTTCCCCAGGATGATCTCCCGCCTCGCATCG | |
| | | CGGCCGTGATTCCCGGTTTAGTTAGCGCAGGTCTGGTTAAGACTGGACAGGGCG | |
| | | CGGTTTGGCTGCCGAACTTGATTCTGCTGCGTCCTATGGGCCAGTGGTTATGGT | |
| | | GTCAGCGGCCTCACCCCTCACCGACCATGTACTTTGGTGACGATAGCCTGGCGC | |
| | | TGGTTCACCGGATGGTAACATATCGTGGCGGCCGTGCCCTGGATTTATGTGCAG | |
| | | GTCCGGGTGTTCAGGCCCTTACCGCAGCCCTCCGCTCAGAGCACGTTACCGCGG | |
| | | TTGAGATCAATCCGGTCGCGGCAGCCCTTTGCCGCACCAACATTGCCATGAACG | |
| | | GTCTGTCCGACCGCATGGAGGTTCGCCTGGGCTCACTGTACGACGTCGTGCGCG | |
| | | GTGAGGTTTTTGATGATATTGTATCAAACCCGCCGCTGCTGCCTGTTCCGGAGG | |
| | | ATGTGCAATTCGCCTTTGTGGGAGATGGCGGACGCGATGGTTTCGATATTTCTT | |
| | | GGACGATTCTGGATGGCCTGCCTGAACATCTGTCCGACCGTGGTGCGTGTCGCA | |
| | | TCGTTGGTTGTGTTCTGTCCGATGGCTATGTGCCTGTTGTGATGGAAGGCTTGG | |
| | | GAGAATGGGCCGCTAAACACGATTTCGACGTGCTTCTTACAGTGACCGCACATG | |
| | | TCGAGGCGCATAAAGATAGTAGTTTTCTGCGTTCAATGAGCCTGATGAGTTCGG | |
| | | CGATCTCAGGCCGCCCAGCGGAGGAGCTGCAAGAACGGTACGCAGCTGATTATG | |
| | | CCGAACTGGGCGGTTCCCACGTTGCGTTCTATGAACTGTGTGCCCGCCGTGGTG | |
| | | GGGGTTCTGCACGTCTGGCCGACGTGAGCGCTACAAAACGCAGTGCGGAAGTGT | |
| | | GGTTTGTTTAATAA | |
| pEG7060 | PaaA | [chemical structure] | 678 |
| | | TTAAAGAATCCCACCACATCATTTTAGCTGACGATGGTGACATTTGCATTGGGG | |
| | | AAATTCCGGGGGTGTCTCAGGTAATCAATGACCCGCCGTCGTGGGTTCGTCCTG | |
| | | CCCTGGCAAAGATGGATGGCAAGCGTACTGTCCCCCGTATTTTCAAAGAACTGG | |
| | | TCAGTGAAGGCGTACAGATCGAATCCGAACATCTGGAAGGCCTGGTAGCCGGGC | |
| | | TTGCCGAACGCAAACTTCTCCAGGATAACAGTTTCTTTTCCAAGGTGTTAAGCG | |
| | | GTGAAGAAGTGGAGCGCTATAACCGCCAGATTCTGCAGTTCAGCCTTATCGATG | |
| | | CGGATAACCAGCACCCTTTCGTTTACCAAGAGCGGCTGAAACAGTCTAAAGTCG | |
| | | CTATCTTCGGTATGGGTGGCTGGGGCACGTGGTGTGCATTGCAGCTGGCCATGT | |
| | | CAGGCATTGGTACACTGCGGCTGATCGACGGCGATGATGTGGAACTGTCGAACA | |
| | | TTAACCGCCAAGTTCTGTATCGCACGGATGATGTAGGTAAAAACAAAGTTGATG | |
| | | CCGCCAAAGACACTATCCTGGCATACAACGAAAACGTGCATGTTGAAACCTTCT | |
| | | TTGAATTCGCCAGCCCGGACCGTGCCCGGCTTGAAGAACTTGTGGGTGATTCTA | |
| | | CCTTTATTATCCTGGCTTGGGCCGCGTTGGGTTACTACCGTAAAGATACGGCAG | |
| | | AGGAAATTATCCATTCGATTGCGAAAGATAAAGCGATCCCTGTAATTGAACTCG | |
| | | GCGGTGATCCTTTGGAAATCTCTGTCGGTCCTATTTACCTGAATGATGGCGTAC | |
| | | ACAGCGGCTTCGACGAGGTGAAAAATTCCGTTAAAGATAAATACTACGACAGCA | |
| | | ACAGCGATATCCGCAAATTTCAAGAGGCGCGGTTGAAACACAGCTTCATCGATG | |
| | | GCGATCGTAAAGTGAACGCGTGGCAATCAGCGCCCAGCCTGAGTATTATGGCTG | |
| | | GTATCGTAACGGATCAGGTTGTGAAAACCATTACCGGGTACGACAAGCCACATC | |
| | | TCGTTGGCAAGAAATTTATCTTGAGTCTGCAAGATTTCCGCAGCCGCGAGGAGG | |
| | | AGATCTTTAAATAATAA | |
| pEG7066 | CinX | [chemical structure] | 679 |
| | | TTCTGCGCGATGCGTTAGATCCGGATCGCTTCGGCCGCGAGATGAAGGCAGTAA | |
| | | CAGAAATTCCCGAGATCGTTAAACTCGGCCATCGTCATGGTTATGGATTTACTG | |
| | | CCGAAGAATTTCTGACCAAAGCTATGAGTTTTGGTGCTCCGCCGGCAGGAGCAG | |
| | | CAGCACCTGGCGAATCAGCCAGCGTTCCTGGCCAGAACGGTTCCTCCCCCGGAC | |
| | | ACGCTGCGCGTGCAGCTATGGCTGGTCCAGAAGCAGGGGCCACCAGCTTTGCCC | |
| | | ACTATGAATACCGTCTGGATGAGCTGCCGGAATTCGCCCCCGTTGTGGCCGAGC | |
| | | TTCCGAAACTGAAAGTCATGCCGCCTTCCGTGGGACCTGATCGGTTTGCAGCAC | |
| | | GCTACCGTGATGAAGATATGCGCACAATTTCAATGAGTCCGGCGGATCCGGCTT | |
| | | ACCAGGCTTGGCACCAGGAACTGGCGGGTCGTGGTTGGCGCGATGCAGAAGATA | |
| | | CGGCTGCTGCTCCAGATGCCCCACGGCGCGATTTTCATCTGCTGAACCTCGATG | |
| | | AGCATGTAGATTACCCAGGTTATGAAGAATATTTTGCGGCCAAGACCCGTGTCG | |
| | | TCGCGGCACTCGAAAACCTGTTTGGTGGTGACGTGCGTTGCTCAGGCTCTATGT | |
| | | GGTATCCGCCGTCGAGCTATCGCTTATGGCATACAAATGCCGATCAACCGGGGT | |
| | | GGCGTATGTACCTGGTAGATGTAGATCGCCCATTCGCGGACCCCGACCGTACCT | |
| | | CCTTCTTTCGCTACCTGCATCCACGTACCCGTGAAATCGTCACGCTGCGCGAAA | |
| | | GCCCTCGTATTGTCCGTTTCTTTAAAGTCGAACAGGATCCCGAGAAGCTGTTCT | |
| | | GGCACTGTATCGCGAACCCCACCGATCGCCATCGCTGGTCGTTTGGTTACGTTG | |
| | | TTCCGGAAAACTGGATGGACGCCCTCCGTCACCATGGCTAATAA | |
| pEG7067 | CapBC | [chemical structure] | 680 |
| | | CCTGGAGGTTGTTGATGTTCGTCGCGGCGAGTCGTTCAAGGCATGGTCGCATGG | |
| | | GTACCCATATCGCACTGTTCGCTGGCACTTCCATCCTGAGTTTGAAGTACATCT | |
| | | GATCGTGGAAACCACCGGCCAGATGTTTGTGGGTGATTATGTCGGAGGCTTTGG | |
| | | TCCGGGTAATCTGGTCCTGATGGGTCCCAATCTGCCTCATAATTGGGTGTCTGA | |
| | | CGTTCCTGAGGGTAAAACCGTTGCAGAGCGTAACCTTGTTGTTCAATTTGGGCA | |
| | | AGCGTTCGTTTCCCGTTGCGAGGATTCCTTAACGGAGTGGCGTCACGTGGAAAC | |
| | | GTTACTGGCGGATGCGCGGCGTGGCGTGCAATTTGGGCCGCGCACCTCTGAGGC | |
| | | CATTAAACCTCTGTTCGCGGAACTGATTCACGCGCGCGGCCTGCGTCGCATTGT | |
| | | GCTGTTTCTGTCTATGCTGCAAATCCTCGTCGATGCAACGGATCGCGAACTGCT | |
| | | GGCATCTCCAGCTTATCAGGCGGATCCTTCGACATTTGCAAGCACGCGCATTAA | |
| | | TCATGCGCTGGCCTACATTGGAAAGAATCTGGCGAACGAGCTTCGTGAAACAGA | |
| | | TTTAGCACGGCTGGCCGGACAGTCTGTTTCCGCCTTCTCTCATTATTTTCGTCG | |
| | | TCATACCGGCCTGCCTTTCGTGCAGTACGTTAATCGCATGCGTATCAACCTGGC | |
| | | CTGTCAGCTTCTGATGGACGGGGACGCATCGGTGACAGATATTTGTTTCCGTAG | |
| | | CGGTTTTAACAACCTGTCCAATTTTAACCGTCAGTTTCTGGCAGTGAAAGGTAT | |
| | | GTCACCCAGTCGGTTCCGTCGCTACCAGGCTCTCAACGACGCGTCACGTGATGC | |
| | | GAGTGAAGCGGCTGCAAAACGCGGCGCAGGTATTGCAGGTGCACCGGCAATCGT | |
| | | TCCAGCGGCTCAAGCACGTGGCGAGGCACGCCCAATTCCTGAAGTGCTGCTTAG | |
| | | [chemical structure] | |
| | | TGACGGCGAGCTCCACACCGGCATCCGGTAATCCAGCTGCCCGTGCATTGCGCG | |
| | | CCGCTGCCTTTGCACTGGCCTTAGGCGGAGCATGCGTTGCGCATGCCGCACCTC | |
| | | TGCGGATTGGCATGACATTCCAAGAATTGAATAACCCGTATTTTGTGACCATGC | |
| | | AGAAAGCACTGAACGAAGCCGCGGCGAGCATTGGCGCGCAAGTGATTGTAACAG | |
| | | ACGCACATCACGACGTGTCAAAACAGGTATCAGACGTTGAGGATATGCTGCAGA | |
| | | AGAAAATTGATATTTTACTGGTGAATCCAACCGACTCCACGGGCATCCAGAGTG | |
| | | CGATTGTTTCCGCAAAGAAGGCTGGCGCCGTGGTCGTGGCGGTCGATGCCAATG | |
| | | CCAATGGCCCGGTGGATTCCTTCGTAGGGTCCAAGAATTTTGATGCCGGCGCTA | |
| | | TGTCATGCGAGTACCTTGCGAAAGCGATCAACGGCGGCGGCGAAGTGGCCATTC | |
| | | TGGATGGCATCCCGGTCGTCCCAATCCTGGAACGTGTCCGCGGCTGCCGCGCGG | |
| | | CACTGGCCAAATTCCCGAATGTGAAAATTGTCGACGTTCAGAATGGAAAACAGG | |
| | | AACGTGCGACAGCGTTAACGGTAACCGAGAATATGATCCAGGCGCACCCGAAAC | |
| | | TGAAAGGTGTGTTTAGTGTAAACGACGGCGGGTCAATGGGCGCTTTGAGCGCCA | |
| | | TTGAAGCGAGCGGCAAAGATATCCGCCTCACGTCCGTAGATGGTGCCCCAGAGG | |
| | | CGGTGGCGGCGATTCAAAAGCCGAACTCCAAATTTATTGAAACAAGCGCTCAAT | |
| | | TTCCGCGCGACCAGATCCGTTTAGCGATTGGTATTGGCCTGGCCAAGAAATGGG | |
| | | GCGCGAACGTGCCAAAAGCGATTCCAGTCGACGTGAAACTGATTGACAAAGGGA | |
| | | ACGCGAAAACCTTTAGTTGGTAATAA | |
| pEG7068 | LasBCD | [chemical structure] | 681 |
| | | ACAGACCGGTTTTGTTGTACTGCCAGACAACGATGCCACCGGCGACGTGACGGG | |
| | | CCGCCTGTTACCTTGGGGTGATGTAGTTACAGTGTATCCGTCTGGCCGTCCATG | |
| | | GATCATCGGCAACTGCTGGGATCGCCCAGTCCTCGTCCATGATGGCGTGATCGT | |
| | | CTTGGGTCATACCAGCGTCACGCGTGATCAAATTGCCCGTCATGGGAACGATCC | |
| | | GCATCGCTTACTGGACGAGGCCGACGGCGCATTTCATGCGGCGGTCCTGATCGG | |
| | | ACACGAAGTTCATGTTCGCGGCTCCGCCTACGGTGTCTGTCGTCTGTATACATG | |
| | | CGTTGTTGACGGTGTGACCTTAGTGAGTGATCGTACAGACGTCCTGCAGCGTCT | |
| | | GGCAGGTACTGATGTGGACGTCGACGTGCTGGCTGGCCACTTGTTAGAGCCGAT | |
| | | CCCGCACTGGTTAGGCGAACAACCGTTATTGACGTCCGTGGAGCCCGTGCCACC | |
| | | GACACATCACGTTATTTTAACTCCGGACGCACGTAGTCGTTTACGGCCATCACG | |
| | | TCGTCGTCGGCCTGAACCGTCGCTGGGTTTGCGGGACGGTGCGGAACTTGTCCG | |
| | | GGAGCGTCTGGCCGCAGCTGTGGCTACCCGTGTGGACAGTCCAGCGTTAATTAC | |
| | | CAGTGAACTGAGTGGCGGCTATGATTCCACTAGTGTGTCATACTTGGCAGCGCG | |
| | | CGGTAAAGCCGAGGTGGTGCTGGTCACGGCCGCGGGACGTGACAGCACAAGCGA | |
| | | GGATCTGTGGTGGGCTGAACGCGCAGCCGCAGGGCTCCCGGAACTCGATCACGT | |
| | | AGTGTTACCTGCGGATGAATTACCGTTTACGTACGCCGGCCTGACGGAGCCTGG | |
| | | TGCACTTTTGGATGAACCGTGTACGGCTGTTGCCGGCCGTGAGCGTGTACTGGC | |
| | | GCTGGTACGTAAAGCCGCGGCCCGCGGCTCTACACTTCATCTGACTGGCCATGG | |
| | | TGGCGATCACCTGTTTACTTCACTGCCGACACCGTTTCATGACCTGTTTCGTAC | |
| | | GCGTCCAGTCGCCGCGCTCCGCCAGTTGCGTGCATTTGGCGCGTTGGCTGCGTG | |
| | | GCCGACCCGTAAGCTGATGCGCGAACTCGCGGACCGCCGCGATCATAGCACCTG | |
| | | GTGGCGCGCGCACGCACGTCCTCAGAATGGCCAGCCGGATCCGCACAGCCCCAT | |
| | | GTTAGGCTGGGCAATTCCCCCGACTGTCCCGGCGTGGGTTACTGCTGACGGCGT | |
| | | GCGCGCGATCGAACTTGGGATTTTAGAAATGGCAGAACGCGCGGAGCCCCTTGG | |
| | | TCATGCGCGCGGAGAACACGCTGAGCTGGATTCAATCTTTGAAGGGGCGCGTAT | |
| | | GGCCCGTGGCCTCAATCGTATGGCTACGCATGCCGGAGTCCCGCTTGCAGCCCC | |
| | | GTTCCATGACGATCGGGTCGTGGAAGCGTGTCTGTCGATCCGGCCGGAGGAACG | |
| | | catttctgcatggcagtacaaacccttactgaacgccgcaatgcagggtgtggt | |
| | | GCCGAGCACCGTTCTTGATCGTAGCGCTAAAGATGACGGGAGTATTGATGTGGC | |
| | | CTATGGGCTGCAGGAACACCGTGATGAACTGGTAGCGCTGTGGGAATCATCACG | |
| | | TCTGGCGGAAACCGGTCTGATTGATGCGGGTATGCTGCGGCGTTTATGCGCGCA | |
| | | GCCGTCCTCCCACGAGCTCGAGCATGGATCCTTGTACGCTACTATCGCTTGTGA | |
| | | [chemical structure] | |
| | | [chemical structure] | |
| | | GTCTTTTACGGCTACGGAATACGGCGGCGTGCTGCTGGATGAAACCAAAGGCGC | |
| | | ATACTGGCGTCTGAACACCACAGGCGCCGAAGTTGTTCGCGCCATGGGGGAAGC | |
| | | CGAGCGGGATGAGATTGTACGGCATGTGGTGGCGACCTTCGATGTTGATGCGCA | |
| | | AACCGCAGCCCAGGATGTCGATGTCCTGCTGGCAGAACTTCGTGATGCCGGCCT | |
| | | [chemical structure] | |
| | | AATATGGCTCTCCGTGGCCATGGTATGTCCGGTCGCCGTCGTCGCTTAGATGCC | |
| | | ACGCGTGCTCGCCTGGCCGTTGTGGTTGCCCGTGTCCTGAATCTCTTACCGCCG | |
| | | CGCTTAATCCGTCGTTGTTTGCGTGTACTGAGTCGCGGAGCCCGCCCTGCCTCG | |
| | | ATTGAGGCAGCAGAAGCTGCTCGTCGTACTGTGGTTGCGGTGAGTCCAGCTGCC | |
| | | GCCGGTGCGTACGGCTGTTTAATCCGCAGCATTGCCACCACCCTGGTTCTTCGT | |
| | | TCACGCGGGCAATGGCCAACCTGGTGTGTTGGTGTACGTGCGGAGCCTCCTTTT | |
| | | GGTGCCCATGCCTGGATTGAAGCAGAGGAGCGGCTGGTGGATGAACCTGGTACT | |
| | | ATGCATACTTACCGTCGTCTTATCACCGTTGGTCCACTGTCTCGCAAAGTTCGT | |
| | | TAATAA | |
| pEG7069 | LasF | [chemical structure] | 682 |
| | | TGGCCGATCTGGTCGATCCACTTCCAGGTCACGCACTGCGCGCTGCGGCGACAT | |
| | | TACGTCTGGCAGATCTGATTGCGGCTGGTGCAGATACTGCACCGGCATTAGCAG | |
| | | CGGCGGCACGCATTGATGCTGACGCGATCGCGCGTCTTATGCGGTATCTGTGCA | |
| | | GTCGCGGGATTTTTCAAGCACATGAAGGCCGGTACGCGTTGACTGAATTTAGCG | |
| | | AATTGCTGCTGGATGAAGATCCATCTGGCCTGCGTAAAACCTTAGATCAGGATA | |
| | | GCTATGGGGATCGTTTCGACCGCGCGGTTGCGGAACTGGTGGACGTTGTACGGT | |
| | | CCGGTGAACCTTCTTATCCTCGCCTTTACGGCTCGACGGTTTATGATGACCTGG | |
| | | CAGCCGATCCTGCCCTCGGCGAGGTGTTCGCGGATGTTCGTGGCTTGCACTCCG | |
| | | CAGGGTATGGGGAAGATGTCGCGGCAGTGGCGGGTTGGTCCTCATGCCTGCGCG | |
| | | TTGTCGATCTGGGTGGAGGGACTGGCTCCGTCCTGCTTGCTGTGTTAGAGCGTC | |
| | | ACCCGTCCCTGTCAGGCGCAGTACTGGATCTGCCATACGTCGCCCCGCAGGCAA | |
| | | AGAAAGCTCTGCAGGCCTCAGCGTTTGCCCAACGTTGTGAATTTATCAAAGGGA | |
| | | GCTTCTTCGATCCGTTACCTCCGGCAGACCGTTACCTGTTGTGTAACGTGCTGT | |
| | | TCAACTGGGATGACGCGCAAGCAGGCGCTATTTTGGCACGCTGTGCGCAGGCGG | |
| | | GCCCTGTGGCCGGAGTAGTGGTAGCCGAACGTTTGATCGATCCGGATGCGGAAG | |
| | | TGGAACTCGTAGCAGCTCAAGATCTGCGTCTGTTGGCTGTTTGCGGCGGTCGGC | |
| | | AGCGTGGCACCGCTGAATTCGAAGCGCTTGGGGCAGCCCATGGCCTGGCGTTAA | |
| | | CCAGCGTTACCCTCACGGCATCTGGTATGAGCCTGCTCCGTTTCGATGTGTGTC | |
| | | GTGCCGGGAGTGCTGGCGGGGAAGTTGTGGAAAAATCTTAATAA | |
| pEG7070 | AlbsBC | [chemical structure] | 683 |
| | | GCGACGGCCCCTCGTCACGTGCGTGCCCTGGATTTCGGTCATGTTCTGGTCCTG | |
| | | ATCGATTACCGTTCCAATCACGTCCAGTGCCTGCTTCCGGCAGCCGCAGCCCAT | |
| | | TGGACAGCCACAGCGCGTACCGGCCGCTTGGACACCATGCCGGCAGCGCTGGCC | |
| | | ACCCAGTTACTGACATCGGCGTTATTAGTACCGCGGCCGACCGCAACACCGTGG | |
| | | ACGGCACCTGTAGCGGCACCACCTGCTCCACCGTCATGGGGTGGATCCGAGCAT | |
| | | CCTGCCGGGACATCACGCCCTCGGGCACGTCATCGGCACTCAACCACGGCTGCG | |
| | | GCGGCGCTGGCATGTGTGCTGGCGATTAAGGCAGCAGGCCCAACCCGCTATGCT | |
| | | ATGCAGCGCTTGACCACGGTCGTGAAGGCAGCCGCTTCTACGTGCCGTCGCCCG | |
| | | GCAACGCCAGCACAAGCGACGGCTGCTGCGCTTGCGGTCCGTCAGGCATGCTGG | |
| | | TACTCGCCAGCGCGTACAGCCTGTCTGGAAGAATCCGCCGCGACTGTCATTTTA | |
| | | CTCGCTACCCGGCGTTTGAGTTCGACATGGTGCCATGGAGTAGCTCCCGATCCG | |
| | | ATTCGCCTCCATGCCTGGGTGGAAACTGAGGATGGGACACCTGTAGCAGAGCCA | |
| | | GCCTCGACCCTTGCGTACACCCCGGCCTTAACCATTGGAGGCCACCATCAACAC | |
| | | [chemical structure] | |
| | | GGATTTTCGACGACCCGTGAAGTTCGTCAACGCCCTGGTAATGCCGAGTTTATT | |
| | | GCTACGGACTCGCCTATTTGGCGCCTCGGTCGTAGTCCAGCTCGTTGCGTGGCT | |
| | | GCGGACCATGGACAGCGTCGCCTGGTAGTGTTGGGAGAATGCGGGGCAACGGAT | |
| | | GGCGAATTATCTCGCCTGGCGACCGCGGGGCTGCCCACGGATATTACCTGGCGC | |
| | | TGGCCAGGCGTGTACGTGGTGGTCGAAGAACAACCGGAACGTACGGTGCTGCAC | |
| | | ACTGATCCAGCAGCTGCACTCCCGGTATACGCAACCCCTTGGCAAGGCGGCTGG | |
| | | GCATGGTCAACCAGCGCGCGCATCCTGGCACGTTTAACAGAAGCTCCAATTGAT | |
| | | GGTCAACGCCTGGCATGTTCAGTGCTGGCCCCGTCTGTTCCGGCTCTGAGCGGT | |
| | | ACCCGCACATTCTTTGCGGGTATCGAACAATTGGCCCTGGGTTCGCGTATTGAA | |
| | | CTGCCGGTGGATGGGTCCCGTCTGCGTGTTACGGTACGTTGGCGCCCGGATCCA | |
| | | GTCCCGGGAGAACCATATCATCGCTTGCGCACAGCGTTGACCGAGGCGGTCGCC | |
| | | CTGCGTGTCAACCGCGCACCAGACCTGTCATGCGACCTCTCGGGCGGCCTCGAT | |
| | | TCCACGTCACTGGCAGTCCTGGCGGCTGTGTGCTTACCGGAGTCCCACCATCTG | |
| | | AATGCTATCACGATTCATCCGGAGGGCGATGAAAGTGGCGCGGACTTACGGTAT | |
| | | GCGCGCTTGGCAGCTGCGCACCACGGGCGTATTCGCCACCACCTTCTCCCCCTT | |
| | | GCGGCAGAACACCTGCCGTATACTGAAATTACGGCGGTGCCCCCTACCACCGAA | |
| | | CCGGCACCTTCAACATTAACGCGTGCACGCCTCGCGTGGCAGTTAGATTGGATG | |
| | | CGCCAGCACTTAGGCAGCCGCACCCATATGACTGGCGATGGAGGCGACAGCGTA | |
| | | CTGTTCCAACCGCCGGCACATCTGGCGGATCTCCTGCGGCATCGGCAGTGGCGT | |
| | | CGGACTTTGTCGGAAAGTTTGGGATGGGCACGCCTTCGCCATACGTCTGTTTTA | |
| | | CCCTTACTGCGTGGAGCAGCAACTCTTGCACGTACATCACGTCGGTCGGGCCTC | |
| | | CAGGATCTCGCACGCGCATTGGCGGGTGCAGGTCAGCAGGGCGATGGTCGTGGC | |
| | | AATGTGAGCTGGTTCGCACCATTACCGCTGCCTGGCTGGGCGACCCCAACCGCT | |
| | | CGTCGCTTACTGCTTGATGCAGCCGATGAAGCTATCTCGACCGCGGATCCGTTA | |
| | | CCGGGACTGGATACGTCGCTGCGCGTACTGATCGATGAAATTCGCGAAGTCGCC | |
| | | CGCACGGCAGCGGCAGATGCCGAACTGGCGGATGCTCACGGAACGACTCTGCAT | |
| | | AACCCATTTCTCGATCCGCGCACTATTGATGCAGTCCTGCGCACGCCAATCGCA | |
| | | CATCGCCCGGCGGTCCACTCGTATAAGCCAGCGCTGGGGCATGCAATGCAGGAT | |
| | | TTGCTCCCGGGTGCAGTCGCTCGGCGCTCAACTAAAGGCTCTTTTAACGCCGAT | |
| | | CATTATGCGGGGATGCGTGCAAATCTGCCAGCATTGACAGCGCTGGCAGATGGC | |
| | | CACCTGGCCGACCTGGGTTTGTTGGAGCCGACGCGCTTCCGCAGTCATCTTCGC | |
| | | CAAGCCGCCGCGGGCATTCCGATGCCGCTTGCGGCGATCGAACAGGCGCTGTCT | |
| | | GCCGAAGCATGGTGTCATGCACATCACGCCACCCCAAGCCCTGCCTGGACAACG | |
| | | CAGCCACCGGAACACCCGCATGCCTAATAA | |
| pEG7071 | AlbsT | [chemical structure] | 684 |
| | | CCCTCTGGATCTCAACTGATACCTGTGGTCTGGGGCCGTATCGCGCTGACTTGG | |
| | | TGGATACCTATTGGCAGTGGGAACAAGACCCAACATTGCTTGTAGGCTACGGTC | |
| | | GTCAGTCACCGCAGTCACTGGAGGCCCGCACGGAAGGTATGGCCCACCAATTGC | |
| | | GTGGCGATAACATCCGTTTCACTATCTATGATCTGTGCAGCAGTACACCTACCC | |
| | | CGGCGGGCGTGGCAACGCTGCTGCCCGATCATAGCGTCCGTACTGCCGAGTATG | |
| | | TTATTATGCTTGCGCCTGAAGCACGTGGGCGTGGCTTAGGAACCACCGCCACGC | |
| | | AGCTGACGTTAGATTATGCGTTTCACATCACCAATCTGCGGATGGTCTGGTTGA | |
| | | AAGTACTGGCGCCGAACACCGCGGGCATCCGTGCGTATGAGAAAGCTGGCTTTC | |
| | | GTACAGTTGGAGCGCTTCGCGAAGCCGGCTATTGGCTGGGGAAGGTCTGCGATG | |
| | | AGGTACTGATGGATGCCTTAGCGAAAGACTTCACGGGTCCAAGTGCAGTCCACG | |
| | | CAGCATTAACTGGCGCCAGCGGTCGCCAGCTGCGCCGTGCACCTTAATAA | |
| pEG7073 | McbCD | [chemical structure] | 685 |
| | | TGGAAGTAACGCATTACACAGATCCTGAAGTTCTGGCCATTGTTAAAGATTTTC | |
| | | ATGTCAGAGGTAACTTTGCTTCCCTCCCCGAATTTGCTGAACGAACTTTCGTGT | |
| | | CCGCGGTACCTCTTGCCCATCTGGAGAAATTTGAAAATAAAGAAGTTCTCTTCA | |
| | | GGCCAGGTTTCAGCTCCGTAATAAACATATCCTCATCACATAATTTTAGTCGTG | |
| | | AAAGGCTCCCATCAGGAATAAACTTTTGCGACAAAAATAAACTTTCCATTCGTA | |
| | | CTATTGAAAAGTTATTAGTCAATGCATTCAGCTCACCTGATCCTGGCTCTGTAA | |
| | | GGCGGCCTTATCCTTCTGGGGGGGCATTGTACCCGATTGAAGTTTTTTTATGCA | |
| | | GATTATCTGAAAATACAGAAAACTGGCAGGCAGGAACTAATGTTTATCACTACC | |
| | | TGCCGCTAAGTCAGGCACTAGAACCTGTTGCTACATGTAATACTCAGTCACTCT | |
| | | ACCGAAGCCTGTCCGGTGGGGATTCGGAACGTCTTGGTAAACCCCATTTTGCTC | |
| | | TCGTCTATTGCATTATTTTTGAAAAAGCTTTGTTCAAATATCGCTACAGAGGAT | |
| | | ACCGGATGGCCTTAATGGAAACAGGTTCGATGTATCAGAACGCAGTATTGGTTG | |
| | | CAGATCAAATAGGACTGAAAAACCGGGTATGGGCGGGATATACCGATTCATACG | |
| | | TAGCAAAAACAATGAATCTGGATCAGAGGACTGTAGCGCCACTGATCGTTCAGT | |
| | | TTTTTGGAGATGTAAACGATGATAAATGTCTACAGTAACCTTATGTCCGCATGG | |
| | | CCGGCCACAATGGCCATGAGTCCAAAACTGAACAGAAATATGCCAACGTTTTCT | |
| | | CAGATATGGGACTATGAGCGTATTACACCAGCCAGCGCGGCCGGTGAAACTCTG | |
| | | AAGTCAATTCAGGGGGCAATAGGTGAATATTTTGAACGCCGTCATTTTTTTAAT | |
| | | GAGATAGTCACCGGTGGTCAGAAAACATTATATGAGATGATGCCTCCATCTGCT | |
| | | GCAAAGGCTTTTACCGAAGCATTTTTTCAGATCTCATCACTGACCCGCGATGAA | |
| | | ATCATAACCCATAAATTTAAAACGGTCAGAGCCTTTAATCTGTTTAGCCTTGAA | |
| | | CAACAAGAAATACCTGCAGTCATAATTGCACTCGACAATATAACCGCTGCAGAT | |
| | | GATCTGAAATTTTATCCTGACAGAGATACATGCGGATGTAGCTTTCATGGTAGT | |
| | | TTGAACGATGCCATAGAAGGTTCCTTGTGTGAATTTATGGAGAGACAGTCCCTC | |
| | | CTTCTTTACTGGTTACAGGGAAAAGCCAATACTGAAATATCCAGTGAAATAGTA | |
| | | ACAGGCATAAATCATATAGATGAGATTTTACTGGCTCTCAGGTCAGAAGGAGAT | |
| | | ATCAGGATTTTCGATATCACCCTGCCCGGAGCTCCTGGACACGCAGTACTAACC | |
| | | CTGTATGGCACAAAAAACAAAATCAGTCGAATAAAATACAGTACCGGATTATCC | |
| | | TATGCTAATAGTCTGAAAAAAGCACTTTGTAAATCCGTAGTGGAATTGTGGCAA | |
| | | TCGTATATATGCCTGCACAACTTTCTTATTGGCGGTTATACTGATGATGACATT | |
| | | ATTGATAGTTACCAGCGTCACTTTATGTCATGCAACAAGTACGAGTCGTTTACG | |
| | | GATTTGTGTGAAAATACGGTACTACTGTCTGATGATGTCAAGTTAACGTTTGAG | |
| | | GAAAATATTACGTCAGACACAAATTTATTAAACTATCTTCAACAAATTTCTGAT | |
| | | AATATTTTTGTTTACTATGCCAGGGAAAGAGTAAGTAACAGCCTTGTCTGGTAC | |
| | | ACAAAAATAGTAAGCCCTGATTTTTTCCTTCATATGAATAACTCAGGTGCAATA | |
| | | AACATTAATAATAAAATTTACCATACCGGGGACGGTATTAAAGTCAGAGAATCA | |
| | | AAGATGGTACCATTCCCATAATAA | |
| pEG7074 | MibO | [chemical structure] | 686 |
| | | ATCCGTATCCAGTGTATCGTCGTCTGCGTGATGAGGCTCCGTGCCACCATGAAC | |
| | | CAGCGTTAGGTCTGTATGCGTTGAGCCGCTACGAGGACGTTCTGGCTGCCCTTC | |
| | | GTCAGCCCACCGTGTTCAGCTCAGCAGCGCGTGCGGTAGCCTCCAGTGCAGCGG | |
| | | GAGCAGGTCCATACCGCGGTGCCGACACCGTTAGTCCGGAGCGGGAAACTGCGG | |
| | | CTGAAGGGCCCGCCCGTAGCCTGTTGTTCCTGGATCCGCCAGAGCACCAGGTGC | |
| | | TGCGTCAGGCGGTGTCCCGTGGCTTTACGCCGCAGGCAGTATTGCGCCTTGAGC | |
| | | CGGCCGTCCGCGACATTGCGGCGGGTCTTGCTGATCGTATCCCCGATCGCGGTG | |
| | | GTGGCGAGTTCGTTACCGAATTTGCGGCTCCGCTGGCAATCGCAGTGATTCTGC | |
| | | GGTTACTTGGTGTACCGGAAGCAGATCGTGCCCGCGTAAGCGAACTTTTATCGG | |
| | | CATCAGCCCTGTCGGGGGCGGAAGCAGAACTGCGCTCCTATTGGCTGGGCCTTT | |
| | | CGGCACTCCTCCGCGATCGTGAAGATGCAGGCGAAGGTGACGGAGAGGATCGTG | |
| | | GTGTGGTGGCGGCTCTGGTCCGTCCTGATGCTGGACTGCGCGACGCGGATGTTG | |
| | | CCGCAGGACCTGCCGTGCGTGCACCGCTGACGGATGAGCAGGTTGCAGCATTCT | |
| | | GCGCCTTAGTGGGGCAAGCCGGCACTGAAAGTGTGGCAATGGCGCTCTCCAACG | |
| | | CATTGGTCCTGTTCGGGCGTCACCATGACCAGTGGCGCACACTGTGTGCGCGTC | |
| | | CGGATGCGATTCCAGCAGCATTCGAAGAGGTCCTCCGCTATTGGGCACCTACGC | |
| | | AGCATCAAGGTCGGACGTTAACCGCGGCGGTACGTTTACATGGCCGTCTGCTGC | |
| | | CGGCCGGTGCGCATGTACTGCTGCTGACCGGTTCAGCCGGCCGGGATGAACGTG | |
| | | CGTACCCAGACCCCGATGTATTTGACATCGGTCGCTTCCACCCGGATCGTCGTC | |
| | | CGTCGACCGCGCTGGGTTTTGGTCTGGGCGCACACTTTTGTTTAGGCGCTGCTC | |
| | | TCGCTCGTCTGCAGGCACGCGTAGCGCTGCGCGAACTGACACGCCGGTTCCCGC | |
| | | GTTATCGTACGGACGAGGAACGCACTGTGCGTTCGGAAGTGATGAACGGGTTCG | |
| | | GCCACAGCCGTGTACCATTTTCCACGTAATAA | |
| pEG7076 | LtM1 | [chemical structure] | 687 |
| | | TTCCCAGAGATCAATGAAACGGATTTCGATAACAATATCAAGCCCCTGCTGGAT | |
| | | GAACTGGAATCTCGTATTACCATTCCGCAGGAGGAACTGAGCTTTTCAAGCATT | |
| | | AACGATGATTTATTTCGCGAGTTAACCCGCAACGAGGAGTACCCTTACCAGAGC | |
| | | ATTTGTACGATCGTTGCAAACATCGTGATGGATGACGGCAGTGAGATTTGGCGC | |
| | | AAAGATATTTTTGTTGATTCCAATAGTGTGCGCGAAGCCGTATGCGACATTCTG | |
| | | AGCCAAACGTTATTCCTCTATTTCATCCGCTGCTTCTCCGAACAAATTAAAGAC | |
| | | ATTCGCAAAACTGATGAGGATAAAGAGTCCACCTACAACCGCTACATTAACCTC | |
| | | CTGTTCAGCTCCAACTTCAAAATCTTCTCCGACGAATACCCTGTCCTGTGGTAT | |
| | | CGGACCATTCGCATCATCAAAAATCGCTGGTATTCTATCAAGAAATCGTTACTG | |
| | | CTGACTCAAAAACACCGTGTGGAGATCGATAAGCAGTTGGACATCCCGCACAAG | |
| | | ATGAAGATTAAAGGCCTGAAAATCGGGGGAGACACGCATAACGGCGGTGCCACA | |
| | | GTGACCACGATCTTCTTTGAGAAAGGGTATAAACTGATTTATAAGCCGCGGAGC | |
| | | ACATCCGGCGAATTCTCGTACAAGAAATTTATCGAAAAGATTAACCCGTACCTG | |
| | | AAGAAAGACATGGGAGCGATTAAAGCGATCGATTTCGGTGAATACGGCTTTTCT | |
| | | GAGTATATTGAGTGTAACACGGATGAAGAGGACATGAAACAGGTCGGTCAGCTT | |
| | | GCATTTTTCATGTACCTGTTGAATGCATCAGATATGCATTATAGCAATGTCATT | |
| | | TGGACCAAACAGGGCCCTGTGCCGATTGATTTAGAAACCTTGTTCCAGCCGGAT | |
| | | CGTATTCGCAAAGGCCTGAAGCAGTCGGAAACTAACGCGTACCACAAAATGGAG | |
| | | AAAAGTGTATACGGAACGGGAATTATTCCAATTTCCCTGAGCGTTAAAGGCAAA | |
| | | AAGGGTGAGGTCGACGTCGGCTTTAGTGGAATCCGTGATGAGCGCTCTAGTTCG | |
| | | CCGTTTCGCGTTCTGGAAATTTTGGATGGGTTTTCGAGCGACATCAAAATCGTG | |
| | | TGGAAAAAGCAGCAGAAGTCTAGCTCCAGCAAAAACAATCTGATTGTCGATCAC | |
| | | AAAAAGGAGCGCGAAATCCTTCAGCGTGCCCAGTCCGTCGTAGAAGGTTTCCAG | |
| | | GAAACCTCTAAAATCTTCATGAAACATCGTGAGGAATTCATCTCCATTATCTTA | |
| | | GACTCATTCGAGAACATCAAAATTCGCTACATCCATAACATGACGTTTCGCTAC | |
| | | GAACAGTTGCTGCGCACTCTGACGGATGCCGAGCCGGCCCAGAAGATTGAGTTA | |
| | | GACCGTCTGCTGCTGAGTCGTACCGGAATTCTGTCCATCTCGTCTAGTCCCTAC | |
| | | ATCTCGCTCTCCGAATGTCAACAGATGTGGCAGGGTGACGTGCCGTACTTCTAC | |
| | | TCGAAGTTTTCGAGCAAAAGTATCTTTGATACCAATGGCTTCGTTGATGAAATC | |
| | | GAGCTGACGCCCCGCCAGGCATTTATCATCAAAGCCGAAAGTATCACCAACGAT | |
| | | GAAGTCGATTTTCAGTCCAAGATCATTAAACTGGCGTTCATGGCACGCTTAAGT | |
| | | GACCCGCACACAACCAACGACAACAAACTGAATAAAAAGGTGATTATCGAAAGC | |
| | | AACCAGCAGAGCAACAGCAGTGAATCAGGTAACAAAGCCATTTTGTTCCTGAGC | |
| | | GATCTGCTGAAAAATAACGTACTGGAAGATCGTTATAGTCATCTGCCGAAAACT | |
| | | TGGATTGGCCCTGTAGCACGTGATGGCGGTTTGGGTTGGGCGCCGGGCGTGCTG | |
| | | GGATACGATCTGTACTCGGGCCGTACAGGACCTGCGTTAGCATTGGCTGCGGCC | |
| | | GGGCGCGTTTTGAAAGATAAAGACAGTATCGAACTTAGCGCCGACATTTTTAAT | |
| | | AAATCGTCCCAGATTCTGCAGGAAAAGACTTACGACTTTCGTAACCTGTTCGCA | |
| | | TCAGGTATCGGCGGTTTTAGCGGGATTACCGGTCTGTTTTGGGCGCTGAACGCG | |
| | | GCAGGGAATATTCTGAACAATGATGACTGGATTAAAACCTCGAATCAGAGTATG | |
| | | CTGCTGCTGAATGAGAACATGCTGAAAGTGGACAAAAATTTCTTTGACCTGATT | |
| | | AGCGGCAACTCGGGAGCGATCGGTATGATGTACCTGACCAATCCAAATTTCTAT | |
| | | TTGTCTCGCTCGAAAATTAACGACATTCTGCTGACCACGGACTGCTTGATTACT | |
| | | GAAATGGAAAAAGACGAAACGAGCGGACTGGCCCATGGCGTGTCTCAGATCCTG | |
| | | TGGTTCCTTAGCATTATGATGCAACGTCAGCCCTCAAGTGAAATCAAAATCCGC | |
| | | GCGACGATTGTCGACAACATCATCAAGAAGAAGTATACGAATTCCTATGGCGAA | |
| | | ATCGAATGCTACTATCCGACTGATGGGCACTCCAAATCCACCTCGTGGTGCAAC | |
| | | GGGACAAGTGGGATTCTGGTCGCCTATATTGAGGGGTATAAAGCTAATATCGTG | |
| | | GACAAATCCTCGGTGTATCATATTATTAATCAGATCAACGTCGAACAACTTCAG | |
| | | CATGATAACATTCCGATCATGTGCCATGGTAGCCTTGGTGTGTATGAATCGCTT | |
| | | AAATATGCGTCAAAGTACTTTGAAATCGAAACCAAGTACCTTCTGGATGTGATG | |
| | | CGCAATGGCGGCTGCTCCTCCCAAGAAGTATTAAAGTACTATGGCAAGGGTAAC | |
| | | GGCCGTTACCCGCTGTCACCAGGTTTAATGGCGGGTCAGTCGGGCGCGTTGCTG | |
| | | CACTGTTGCAAACTGGAGGATAACGATATCAGCGTGAGCCCCATTTCACTGATG | |
| | | ACGTAATAA | |
| pEG7077 | LtnM2 | [chemical structure] | 688 |
| | | CGTGGATTCTATCATCGAATTCTACAAAAAGGACATCTACCTGGCATACAAAGA | |
| | | GCTGGAACGCGAAATCAAAAACATCGATAAGACCATCTACAACACTTCAAATGA | |
| | | CGAGATCTTGCGGATTTTTAAAGAGAGCCTGATCAGCATCATCACCGATGATAT | |
| | | TTACCGCCTCTCGATTAAAACCTTCATCTATGAGTTTCACAAGTTTCGTATCGA | |
| | | TAACGGGTTTCCGGCTGTCAAAGATAGCGAAAGCGCCTTCAATTATTACATCAG | |
| | | TACCTTTGACGTGAAAACGATCGCTCGCTGGTTTGAGAAATTCCCAATGCTGGA | |
| | | ATCCATCATCTCCAGTAGCATCAAAAACGATTGCACATTTATGGTGGATGTATG | |
| | | TGTCAATTTCATCTTAGACCTGTCGGAATGCGAGAAGATTAATCTGATCTCAGA | |
| | | GGATAGCCGGCTCATCACGATCTCATCCAGCAACTCTGACCCGCACAACGGTGG | |
| | | CACGCGTGTCTTGTTCTTTCGTTTCCACAACGGTGATACCATTCTTTACAAACC | |
| | | CCGCAGCCTGACCGTGGACAAGCTGATCTCTAATATTTTCGAAGAGGTATTCGA | |
| | | ATTCGATGCGACGAACTCGAAAAATCCTATTCCCAAGGTGCTGGATCGGGGTAC | |
| | | CTATGGCTGGCAGGAATTCATTGAGAAGAAATCGATCTCTTCCTCAGAGATTAA | |
| | | GCAGGCCTACTATAACCTGGGTATCTTTAGCAGTATCTTTACAGTGTTAGGGTC | |
| | | TACTGATATCCACGATGAAAACTTGATTTTTAAAGGTACGACCCCGTATTTCAT | |
| | | CGATCTGGAAACAGCCCTCTCTCCGCGTATCCGGTATGAAGGTAATGAGGAAAA | |
| | | CCTGTTCTATCGGATGAGCTCATCGTTGTTCACTTCTATCGTGGGGACGACTAT | |
| | | TATTCCTGCAAAACTTGCTGTCCATTCCCAGGAAATTATGATCGGCGCAATTAA | |
| | | CACCCCTGCGAAACAGAAAACCAAGAAGGATGGCTTTAACATCATCAACTTCGG | |
| | | CACGGATGCCGTCGATATCGCAAAACAGAATATTGAGGTGGAGCGTATTGCTAA | |
| | | CCCTATGCGCATTAAAAATAACATCGTGAACGATCCGCTGCCGTACCAGAACAT | |
| | | CTTTACGCGCGGCTTCAAAGAGGGGATCAAATCCATCATCCTGAAGAAAGGCTC | |
| | | GATCATTTCCATTCTGAACAACTTCAACAGCCCGATTCGTTACATCATGCGGCC | |
| | | GACGGCAAAATATTATTTGATTCTGGATGCCGCGGTATTTCCCGAAAACCTGTA | |
| | | TTCGGAACAGACACTGAACAAAACCCTGAATTACTTAAAGCCGCCAAAAATCGT | |
| | | GGAAAATTCCCTGATTTCTAAACAGCTCTTTCTTGCCGAAAAACGCATTCTGTC | |
| | | CGAAGGCGATATTCCGAGCTTCTATGTGCTGGGCAAAGAGAAAAATATCCGTGC | |
| | | GCAGAACTTCATTAGCGAACAGATCTTCGAGGAAACCGCGGTCGATAACGCGAT | |
| | | TCAAATTCTGGAATCCATTTCGCAAGACTGGGTGAATTTTAATGAGCGCCTGAT | |
| | | TGCGGAGGGCTTCTCCTATATTCGTGAACAGAGTCGTGGCTATCTGTCCAGTGA | |
| | | TTTTGAGAACTCTGATATTTTCAAAAGCTCACTGACCGAAACAAAGAAGTCCGG | |
| | | TTATACCGCAATGCTGAAAACAATTATCTCCATGTCGGTCAAGACCTCGGAAAA | |
| | | CAAAAAGATCGGTTGGCTGCCAGGCATTTATGATGATTATCCGATCAGCTATAT | |
| | | GAGTGCCGCGTTTTGTTCGTTCCATGATTCCGGCGGTATCATCACTTTGCTTGA | |
| | | ACACCACTTTGGGCACTGCTCCCCCGAATATAACGAGATGAAGCGCGGGCTGCT | |
| | | GGAACTGGGCAAAATGTTGAAAATTAACAATAGTAACCTGAGCATCATCTCCGG | |
| | | CTCAGAGTCTCTGGAATTTCTGTATACGCACCGCGAAGTCGAATGCCTGGAACT | |
| | | GGAATACATTTTAAACAATTCAGCGGAAATCATGGGCGACGTGTTCCTGGGGAA | |
| | | ATTAGGCCTTTATCTTATCCTGGCGAGCTACCTGAAAACAGACCTGAAAATTTT | |
| | | CCAAGATTTCAGTATCATCTGCCAGAAAAACCTCGAGTTTAAAAAGTTCGGGAT | |
| | | CGCGCACGGTGAATTAGGGTATCTGTGGACCATCTTCCGTATTCAAAACAAACT | |
| | | GAAGAACAAAAATGCGTGTCTGAGCATCTATCATGAAGTGTTGAACATTTATAA | |
| | | AGGTAAGCGCATTGAATCCGTGGGATGGTGCAACGGTTTATCGGGTATTCTGAT | |
| | | GATTTTGTCAGAAATGAGCACCGTATTAGAGAAAAATCAAGACTATCTGTTCAA | |
| | | GCTGGCAAATCTGAGCACTAAACTGAATGAGGAATCCGTTGACCTGAGTGTGTG | |
| | | CCACGGCGCCAGCGGGGTGCTTCAAACACTGCTTTTCGTCTATAGCAACACGAA | |
| | | CGATAAACGTTATCTCAGCCTGGCCAATAAGTATTGGAAGAAAGTGCTGGATAA | |
| | | CAGCATTAAGTACGGTTTCTACAATGGAGAACGCGATAAGGATTATCTGTTGGG | |
| | | ATATTTCCAGGGTTGGTCAGGCTTCACGGACAGCGCACTCCTGCTGGATAAATA | |
| | | CAATAACAATGAGCAAGTGTGGATTCCGATCAACCTGAGCTCCGATATCTATCA | |
| | | GCATAATCTGAACAACTGCAAAGAGAAGAATTATGAGGGCGATGGCTGCCATAA | |
| | | ATCTTAATAA | |
| pEG7078 | CrnM | [chemical structure] | 689 |
| | | AAAACTAAAACCATTAACGAAAAGATTAAAATTTTCACCAAAGAAGAGGTGATT | |
| | | GATATCAGTTACTTTGAAGAATGGCGCAGCGTTCGTACTCTGCTTAACGAAAAC | |
| | | TACTTTAAAATTATGCTCGAGGAAATGAATATTTCCAAAAACCAATTTTCGTAT | |
| | | GCGCTGCAACCGTTAAACGACGAGTTCAAACTGCATACTAACGTTAAAAATGAA | |
| | | GAATGGATCAAATGCTTTAATCGCGTCATTAACAATTTTAACTATAAAAATATT | |
| | | AACTATAAAGTTGGTTTGTACCTGCCTATTCAGCCTTTCTCCGTTTATTTACAG | |
| | | GAGAAACTGAAAGAGATCCTGAAGAAGCTGAACAACATTAAGATTAATGATAAA | |
| | | ATTATCGACGCCTTTATCGAAGCTCACCTGATCGAAATGTTCGACCTCGTCGGT | |
| | | AAAGTAATCGCCCTTAAATTTGAAGATTATAAACAGATCAACTTCCTGAAAAAC | |
| | | ACAAATAATGGCACCCGCTTGGAGGAATTCTTGCGTAGCACCTTTTATTCTCGG | |
| | | AAGTCATTTCTGAAACTGTTTAACGAGTTTCCGGTACTCGCGCGGGTTTGCACC | |
| | | GTACGTACGATCTATTTGATCAATAACTTTAGTGCTATCATCCAGAACATCAAT | |
| | | AGCGACTACCTGGAAATCCAGGAATTTCTGAACGTCGATTTCCTGAACTTGACA | |
| | | AACATCACTCTTTCGACGGGTGATTCCCACGAACAGGGTAAAAGTGTGTCCATC | |
| | | CTCTATTTTGATGAAAAAAAGCTGATTTATAAACCGAAAAATCTGAAGATTTCA | |
| | | GAAATTTTCGAGAGCTTCATCGACTGGTACACCAACGTCTCTAACCATAAGCTG | |
| | | CTCGACCTGAAAATCCCGAAAGGAATTTTTAAAGACGATTACACTTATAACGAA | |
| | | TTTATTGAGCCAAACTACTGCGAGAATAAGCGCGAAATTGAAAATTACTATAAC | |
| | | CGTTATGGGTACCTGATCGCAATCTGTTATCTGTTCAACCTGAATGACCTGCAT | |
| | | GTAGAAAATGTGATCGCCCATGGCGAGTACCCGGTTATTGTTGATATTGAAACG | |
| | | AGCTTTCAAGTCCCTGTGCAAATGGAGGACGATACTTTATATGTGAAGCTGTTG | |
| | | CGCGAGCTGGAATTGGAAAGCGTTTCATCGTCGTTTCTGTTACCTACCAATCTG | |
| | | TCGTTTGGTATGGACGATAAAGTGGACCTGTCCGCGCTGAGCGGAACCATGGTC | |
| | | GAGCTGAATCAGCAAATTCTGGCGCCTGTCAACATTAATATGGACAACTTTCAT | |
| | | TACGAGAAATCACCGAGCTATTTTCCAGGCGGAAACAATATCCCTAAAAACAAC | |
| | | AAATCAGTGACTGTTGATTATAAAAAATACTTGCTCAATATTGTGACTGGTTTC | |
| | | GACGAATTTATGAAGTATACCCAAGAAAATCAGCTGGAATTTATTGAGTTCCTG | |
| | | AAAAAATTCTCAGATAAAAAAATCCGGGTGCTGGTGAAGGGTACGGAAAAATAT | |
| | | GCGTCCATGATTCGCTACAGCAACCATCCGAACTACAACAAAGAAATGAAATAT | |
| | | CGCGAGCGTCTCATGATGAACTTGTGGGCGTACCCTTACAAAGACAAGCGTATT | |
| | | GTTAATAGCGAAGTACAGGACCTGTTATTTAACGATATCCCGATCTTTTACTCC | |
| | | TTTCCAAATAGCCGTGACCTCATTGATAGTCGCGGCTTGGTGTATAAAGATTAC | |
| | | CTTCCTGTGACAGGACTGCAGAAAGCAATTGATCGCGTGAAAGATACCTCGGTA | |
| | | AAAAGCTTGTTCGACCAGAAGCTGATTCTTCAGAGTAGCTTAGGTCTGTGGGAT | |
| | | GAGATTCTCAACAAGCCGGTCCAGAAAAAGGAACTGCTCTTTGAAAAGCAGAAC | |
| | | TTTAACTATGTGAAAGAGGCGATCAATATTGCGGAATTGCTGATTGGCTATTTA | |
| | | ATCGAAACGGACGACCAGAGCACCATGCTGAGCATTGATTGTTCTGAAGATAAA | |
| | | CACTGGAAGATTGTTCCTTTAGACGAATCCCTGTATGGTGGGCTGTCCGGCATT | |
| | | GCATTATTTTTTCTCGATATTTATAAAATTACCAAAGATGAAAAATATTTTAAT | |
| | | TACTATGATAAAATCATTTCCACGGCCATTAAACAATGTAAAGCGACCATCTTC | |
| | | TCGTCAAGCTTCACGGGTTGGCTGAGTCCCATTTATCCGTTGATTCTGGAAAAG | |
| | | AAATACTTTGGTACCATGAAAGATAAGAAATTCTTTGACTACACGATGGAAAAG | |
| | | CTGTCGAATATGACTGAAGAACAAATTAACAACATGGATGGTATGGACTATATC | |
| | | AGTGGCAAGGCGGGTATTGTCAAACTGCTGATTAGCGCGTACCGGGAATCGAAG | |
| | | AACAATGAAAACATCGGACTGGCCCTGAGTAAATTCAGCAACGATCTGATTCAA | |
| | | AATATTGGCACCGGCAAAGTCAGTGAATTACAAAACGTGGGCCTGGCGCACGGC | |
| | | ATTTCTGGTATTATGGTCGTAGTAGCCTCACTGGACACGTTTAAAAGTGAATAT | |
| | | ATTCGCGAGCAGCTGGCAATTGAATATGAGATGTTCTGTTTGCGTGAAGATTCA | |
| | | TACAAATGGTGTTGGGGCATCTCTGGAATGATTCAAGCCCGTCTCGAAATTCTG | |
| | | AAACTGAGCCCGGAGTGTGTGGATAAAAAAGAGCTGAACTTGCTTATTAAGCGT | |
| | | TTTAAAAACATCTTGAATCAGATGATTAACGAAGATTCCCTTTGTCACGGCAAC | |
| | | GGTTCGATCATTACTACGATGAAGATGATCTATATGTACACCCAAGACACCGAG | |
| | | TGGAACTCTCTGATTAATCTGTGGTTATCAAATGTAAGTATCTATTCGACCTTA | |
| | | CAAGGCTATAGCATTCCAAAGCTGGGCGATGTAACAATTAAGGGGTTGTTTGAT | |
| | | GGCATTTGTGGTATTGGCTGGTTATACCTGTATTCGAACTTTAGCATTGAAAAC | |
| | | GTGCTGCTCCTCGAGGTCTAATAA | |
| pEG7079 | BsjM | [chemical structure] | 690 |
| | | GAGGCCATTAAAGGTTTGACCGTATCAGAACGTTATGACACTCTGAAAAATTCG | |
| | | GGAGTCAACCTGAATCTGAACATTTCGGCTTTGGAAGAGTGGCGCAACCGTAAG | |
| | | AATCTTTTAGCCGATGAGGACTTTACGGAGATGCTGACGGTGCTGGAATATGAC | |
| | | CCGGTGTATTTTAGCCACGCGATTAACGAGAACATCGAAGAACATATCGATATC | |
| | | TACAAGAGCAAAATTCTGGGGGAAAACTGGTTTATCGTGCTGAACGATATTCTG | |
| | | GACGAGCTCGATAATCCCATCGAATACAAGAAAGAGATGAATCACAGCTACCTC | |
| | | CTGCGTCCGTTCTTGCTCTACGCCGAAAAGGAGATGAACAAATACATTGTCAAT | |
| | | CGTAAGGAGTTACTTCCGGTGGAACCCCAGGTCATCCAACAGATCATGGAAAAT | |
| | | TTGGCCTCCAAACTGTTCGCCGTTTCTGTGAAAAGCTTTGTCCTGGAGCTGAAT | |
| | | ATTTCGAAATTGAAGGACGAACTGGCCGGCGAAACACCGGACGAACGCTTTCAC | |
| | | TCATTTATTCGTTTGATGGGTGAGAAAACGCGCCTGGTGGACTTTTACAACGAA | |
| | | TATATCGTTCTGAGTCGTATTCTGGTGAACATCACGATCTTATTCGTCAACAAC | |
| | | ATTATTGAGCTGTTTGAGCGCCTGCAGGAATCCAAGCTGGATATTGTTAAGAAA | |
| | | CTTGGCGTGCAGGAGGAGTTCAAAATCAGTAATATTAGCATTGGCGAAGGTGAT | |
| | | ACACATCAGCAAGGACGCTCGGTTATCGTTCTTACGTTCGTGAGTGGAAAGAAA | |
| | | GTGGTGTATAAACCAAAAAATCTGAAAGTTGTTTCTGCTTATAATTCTTTAATT | |
| | | GACTGGATCAACAATAAAAATAATATTCTGAAAATGCCTTCGTATAACACATTG | |
| | | ATTTATGATGATTTCGTGATCGAGGAGTTTGTCGAGAAACGTGACTGCAAAAGT | |
| | | ATCGAGGAGGTCAAAAAATATTATATTCGTTATGGGCAAATTTTGGGGATTATG | |
| | | TATATCTTAAATGGGAACGATTTTCATATGGAAAACCTGATTGCCTCGGGTGAA | |
| | | TATCCGATCATTGTTGACTTGGAAACGCTGCTTCAGAACATTATCAATTTTAAA | |
| | | AACAAACCATCAGCGGACTTGATCACCACCAAAAAGATGCTTAACCTGGTAAAC | |
| | | AGTACTCTGCTGCTCCCTGAAAAACTTCTGAAGGGCGACATCACGGACGAAGGA | |
| | | ATCGACATGTCAGCCTTGGCAGGGAAAGAACAACACTTGGAACGCCGCGAATAC | |
| | | CAGTTGAAAAACCTGTTCACCGACAACATGGTTTTTGATCTCGAAAAAGTGAAA | |
| | | ATCGAAGGTGCGAACAACATCCCGAAATTAAACGGTGAAAACGTTGACTACAGC | |
| | | ACCTATATTGATGAGATTGTGGTTGGGTTCGAAAATATCTGTAACCTGTTCATT | |
| | | CAATATCGCGACGAGTTACTGCATTCCGGCATCCTGGAGGAGTTTAAAGATGTG | |
| | | AAGGTTCGTCATGTGCTTCGCAATACGGTTGTTTATGCTAAGATGCTGGCGAAT | |
| | | ACATATCATCCAGATTACCTGCGTGATTCGTTGAATCGCGAACAGGTTCTTGAA | |
| | | AACATTTGGGTGCATCCGTTTGAGCGCAAAGAATTCATTAAGAGCGAGATGGAA | |
| | | GATATCCTCAACAACGACATCCCGATCTTTTTCTCATACGCGTCGTCTAAGGAT | |
| | | ATTATCGATTCGAATGGCAAACTGCACAAAAACGTTATGGAAATTTCGGGTTAC | |
| | | GAACGTTTTACCACCAAACTGAAGGAACTGAATCCCTTTCTGATTGAACAGCAG | |
| | | GTGAGCGTTATTAATATTAAAACCGGCCGCTATGGGGATAAGAAATTCGAAAAA | |
| | | AATTATAGCGTGCGCGACGTTGCAACGGAGAAAAAAGATAATCCGATTGATTTC | |
| | | CTGCAGGAGGCAATGAATATCGGCGATAAAATTTTGGAACATGCTATCATCTGT | |
| | | GATGAGACCAAAACGATTTCGTGGCTTACCATTAACAACCATCATGATAAAAAT | |
| | | TGGGAAATTGGGCCTATTTCCGGTGAATTTTATGATGGTCTGGCGGGAATTTCA | |
| | | CTCTTCTACCACTACCTCTATAAAAAATCCCACAATGTCGAGTATAAAAAAATT | |
| | | CGTGATTACGCGTTCAACATGGCGAAAGTCAAAGCCCTGTCACTGAAATACGAT | |
| | | AGTGGCTTGACCGGTTACGCTTCCTTGCTGTATACGGCACACAAGATTGTTCAG | |
| | | GATGAACCGCGGAAGCAATACAAAGACGTGATCAACGAAGTGTTCAAGTACATT | |
| | | GATGAGAGCAAAGTCGTGACCGCTAAGTATAACTGGTTGCATGGCACTGCCTCT | |
| | | ATTATTCATGTGTTATTGAACCTCTACGAGGACTCTCGTGATATGGCGTACCTG | |
| | | ACTAAATGTATTCAGTACGGCAAATATTTGGTCAAGCAAATCAAAGAACACAAG | |
| | | GATATGCTTGCGCCTGGCTTTAGCCAGGGCATCTCTTCGGTCATTATGGTTCTG | |
| | | GTGCGCTTAAGTAAAAAGTGTGAAGTCGAAGAATTTCTCGAATTAGCTCTGGAA | |
| | | TTAATGGAAATGGAACGCAACAAACTGGGAAACCTTTCTGAATCAAACTGGCTG | |
| | | AACGGCTTGGTGGGCATTGGCTTATCACGTATCAAACTGAAAGGACTGGATTCC | |
| | | AACTTACAGGTCGACAACGACATCGAACTCGTCCTGGATGGCGTCATGAACAGC | |
| | | TTGTACTCAAAAGATGATACTTTGAGCTGTGGTAACTCTGGCACAGTGGAATTG | |
| | | TTCCTGAGTCTGTTTGAACAGACGAAAAAGAAAGAGTATCTGGATATGGCGAAA | |
| | | GCAATCTGCGGGAAAATGATCGAAGAGAGTCGCATCTCCTTTGAGTATCAGACA | |
| | | AAGAGTCTGCCGGGTTTAGAACTGGTGGGCCTCTACTCTGGCTTAGCCGGAATT | |
| | | GGTTATCAATTCTTACGTATCTCGGACGTTGAGGATATTGCGAGCATTGCTACC | |
| | | TTAGATTAATAA | |
| pEG7127 | PsnB | [chemical structure] | 691 |
| | | TAGGAAGTCCGGATGATCTTCACGTCCAGTCAGTGACGGAGGGTCTGCGTGCAC | |
| | | GCGGTCACGAGCCTTACGTGTTTGACACCCAACGTTTTCCGGAAGAGATGACAG | |
| | | TGTCACTTGGTGAACAGGGTGCCTCTATTTTTGTCGATGGCCAGCAAATTGCAC | |
| | | GTCCGGCGGCGGTGTACCTCCGTTCACTGTACCAGAGCCCCGGCGCGTATGGGG | |
| | | TGGATGCCGACAAAGCGATGCAGGATAACTGGCGCCGCACATTGCTCGCTTTTC | |
| | | GCGAGCGTAGTACCCTGATGAGCGCTGTGCTTCTGCGTTGGGAAGAAGCGGGGA | |
| | | CTGCAGTGTATAATTCGCCACGCGCGTCGGCGAATATCACTAAACCGTTTCAGC | |
| | | TGGCGCTGCTGCGCGACGCTGGTCTGCCGGTACCACGTAGCTTGTGGACAAACG | |
| | | ACCCTGAAGCAGTGCGGCGGTTTCATGCGGAAGTGGGTGACTGTATTTACAAAC | |
| | | CGGTCGCCGGGGGAGCGCGTACACGCAAACTGGAAGCGAAAGATCTCGAAGCGG | |
| | | ACCGCATCGAACGCCTGAGTGCAGCGCCGGTGTGTTTTCAAGAACTGCTCACAG | |
| | | GAGATGATGTGCGTGTTTACGTGATAGATGACCAGGTAATATGCGCCCTGCGCA | |
| | | TCGTAACTGATGAGATCGATTTCCGCCAAGCAGAGGAACGTATCGAGGCCATCG | |
| | | AAATTTCAGATGAAGTAAAAGACCAATGTGTACGTGCCGCCAAACTTGTTGGCC | |
| | | TGCGCTACACCGGTATGGATATCAAAGCCGGCGCCGATGGTAACTATCGTGTTC | |
| | | TCGAACTGAACGCGAGTGCGATGTTTCGCGGTTTCGAAGGCCGTGCGAATGTGG | |
| | | ATATCTGTGGACCGCTGTGTGATGCATTGATCGCTCAGACCAAACGTTAATAA | |
| pEG7130 | AMdnC | [chemical structure] | 692 |
| | | CCACGATAACGAGAGCATTTCATTGGTAACCCAAGCCATTGAATCCCAGGGTGG | |
| | | TAAAGCATTTCGCTTCGATACCGATCGTTTTCCGACGGAAGTCCAGCTGGACAT | |
| | | CTATTACTCAAATACAGAGAAATGCGTGCTGGTGGCTGACGATCAAAAACTGGA | |
| | | TTTAAATGAAGTAACCGCGGTCTGGTATCGCCGCATTGCGATCGGTGGCAAAAT | |
| | | CCCGCCCACGATGGATAAGCAACTTCGTCAGGCCTCGATTCAGGAGAGTCGTGC | |
| | | TACAATTCAAGGCATGATAGCGAGCATTCGCGGCTTTCACCTTGACCCAGTGCC | |
| | | GAACATTCGTCGCGCTGAAAATAAGCAACTGCAGCTGCAGGTTGCCCGCAAAAT | |
| | | CGGACTGGATACCCCACGCACTCTCACCACTAATAATCCGCAGGCCGTGAAGGA | |
| | | ATTTGCGGCAGAATGCCAGCAGGACGTAATCACCAAAATGCTGAGTAGTTTTGC | |
| | | GATTTATGATGAGAAAGGCGGAGAACAGGTGGTTTTCACCAATCCCGTGAAATC | |
| | | TGAGGATCTGGAAAATTTAGAAGGTCTGCGCTTTTGCCCTATGACGTTTCAAGA | |
| | | GAAAATCGCAAAGGTTCTGGAGCTCCGGATCACCATCGTGGGTAAGTCAATTTT | |
| | | AACGGCTGCGGTGAATTCACAGGCCCTGGACAAATCCCGTTATGATTGGCGCAA | |
| | | GCAGGGCGTAGCATTACTGGATGCATGGCAGACCCATACGTTACCCCAGGACGT | |
| | | GGCTGATAAATTGCTTCAACTGATGGCCCATTTCGGGTTAAACTATGGAGCCAT | |
| | | TGACGTGATTCTGACCCCGGATAATCGCTATGTGTTCTTGGAGGTCAATCCGGT | |
| | | GGGCGAATTCTTTTGGCTTGAGCGTTGCCCAGGTCTGCCGATTAGTCAAGCTAT | |
| | | TGCTAAAGTGCTGCTTTCTCATATATAATAA | |
| pEG7132 | AtxBC | [chemical structure] | 693 |
| | | AGGTTTGGCCCTCGTGGATCAGCATCCGATTTTTCTGGACCTGAAAACAGACCG | |
| | | TTACCTGTCGTTGAGTCCAGATGGGGCAGCAGTCCTGCTGGGAGCAGCGCCAGC | |
| | | CACCAAAGAGAGTCCACTGTTTCTCGGATTAGAATCCATTGGCTTGGTCAAAAA | |
| | | CGGTCCGTCAGGCCTTAAGCCTTGCCAAATTGCCGTAGCCACTGGGTCTGCACC | |
| | | GCCCCGTAAGGTGCAATTCGAGTCGTTGTCACTCCTGCTTTTGCGCTTAATTCG | |
| | | TGCACGTCTGGATCAACGTGCTCTTTTGAAGCGTGTGACCGACTTAAAGAAGGC | |
| | | CGGCACCATTGCCCAGACGAAGAACCGTGACTGCGCCTTGTCATTATTAGGTAG | |
| | | CGTGGAGACTGAGGCAAAGGCTTGTCGTACCCTTTTAAGTAGTACAGACAAATG | |
| | | CCTGCCCGACGCATTCGCAATTGCAACGCACCTGCGCCGTCGCGGAGTAGACGC | |
| | | CAAGTTAGTTTTCGGTGTGCGCCTGCCATTCGCGGCACATGCCTGGGTCCAGGT | |
| | | AGATGATATTGTAGTGGGTGATCGTCCCGACCGTATCCTTGCGTTCACCCCCAT | |
| | | [chemical structure] | |
| | | TATGTCGCGTCTTTCTTTGTTCGCGGACATGTCAGCACACCAGCACTGCGTCAC | |
| | | CCAGAGCCAAAGGGTTTCGCTTATGCAAAAGTCAGTGGCGGACTGAGCGTATGG | |
| | | AGCGATGCGCCGATTCGTCACCGTGCGCCCCTTATTACAGTGGGCGCGGTGTTC | |
| | | GATCGCGCGTCTTTTAAAGGGCTGGATTGCGACTTATCAGGTCTGCGTCAGGAT | |
| | | GGTCTTAATACATTGAAAGCGGAAACGTTCGGACCCTACCTGGCGTTAGAGGTT | |
| | | GCCGATAACGGCACCCTTCGCGTTTATCGCGATCCGTCAGGCGGCGCGCCTTGC | |
| | | TATTACCTGCAGACCGAGGACGGCTTCTGGCTTGCAAGCGATGCTGATTTGTTA | |
| | | TTCACTCATTCGGGCGTACATCCATCAGTAAGCTTACCGGGACTGATTGAACAC | |
| | | TTGCGTCGTCCAGAGTTCCAAAATGAGGGCACATGCTTAAACGTCAAGCAAGTA | |
| | | CGCCCTGGGGAGCAGGTTGATTTATCGCTCTCGGGCGAGGTCCGTGCCTGTTTG | |
| | | TTCCCGCCTGCATCATCCCTGCGCCCGCCTGAGTTGCACCGCGCATACGATGAC | |
| | | ATTAAGGCTGAGCTGCGCGCTCTGATTTTACGCAGCATTAAGGCCTATGCCAGT | |
| | | GATTTCCCTCACGTTGTTGTTAGCTTCAGCGGTGGTCTGGATAGCAGTGTTGTT | |
| | | GCGGCCGGCTTAGCGCAAACTTCCACTAAGGTCCTGCTTCACACCTTTAAGGGC | |
| | | CCAGATGCCAAAGGGGACGAGACTGCCTTCGCCGCAGAATGCGCGGCATATCTG | |
| | | GGTTTAAGCTTAGAGATTGATACTCTCAGTATCGATGACGTTGATCTGTCGGCA | |
| | | ACTATTTCCCCGCACCTGCCGCGCCCCAGCACATCATTCTTCTTGCCATCACTG | |
| | | CTGCGCGGTTTCTCTACCTCGAGCCAAACGCGCACAGGCGGGGCAATCTTTTCG | |
| | | GGAAACGGCGGTGACTCGGTCTTTTGTTTCATGCATAGCGCGACCCCGCTGGCC | |
| | | GATTTGATGTGTCGTCCGTCAGGTCTTACGCCGTTCATGCAAACATGGGCCGAC | |
| | | GTGCAAAAGCTTACCCGTGCCTCAGCGACCGAAGTGCTGCGTCGCGCGTTAAAG | |
| | | ACAGCCATGGCGCGTGGCTACATCTGGCCTGAATCCAATCTCCTCTTGTCCCGC | |
| | | GACACAAGCTCGAGCCGTTTAACACCTGACTCCGTTCTGTCGAGCCTTGAGGGG | |
| | | ATTCTGCCCGGTCGCTTGCGTCACCTCGCCCTGATTCGTCGTGCTCACAACACC | |
| | | TTCGAGCCATTCGCCCCTTGGCGTACGCCGCCAGTCGTTCACCCTCTCATGGCC | |
| | | AAGCCGATTCAAGCCTTCTGCCTTTCTCTTCCTTCATGGATGTGGGTCAGCGGT | |
| | | GGTAAAGACCGCTCGCTCGTGCGTGACGCGTTCGAAGGATTACTTCCAGATTCA | |
| | | GTGCGCCTTCGTAAATCAAAGGGAAGTCCTGCAGGCTTTCTGCATGCGCTGTAC | |
| | | CGCGCCAAGGGTCGTCAAATGATTGAGCGTATCCGTCACGGTTACCTGCGTCGT | |
| | | GAGGGGATCATCGATATCTCTACTGGCCCGGACGCATTGTTCTCGGAAGGGTTC | |
| | | CGCAATCCGCGTGTAATGCACCGTTTCTTTGAGCTCGCCGCAACTGAGGTGTGG | |
| | | ATCGATCACTGGCGCAACTGGCGCCGCCCCCGCACATAATAA | |
| pEG7133 | Cln1BC | [chemical structure] | 694 |
| | | CCACGCGGTCGCTCTGGACGAAGATATCGTGGTGCTGGATGCGGTGAGCGACGC | |
| | | ATACCTGTGTTTAGTTGGTGCCAGCGCTCTGATCAGCTTGGGCAGCGAGCGTTC | |
| | | CGTCAGTGCAGATCCGGTGGCCGCTGAGACACTTCGTGAGGCTGGTCTGGTGGG | |
| | | TCCACATCCTAGCGGCGCCACCCGACCAATACCTCCGAAGCCGACGATTGACTT | |
| | | ACCTGATGCAGCCCGTCAGGCGCAAGGTCGTGAATTACGTGCCGCCGCGTGGGC | |
| | | TGGCGCGGCAACCGCAATCGATTTCCGCCGGCGTTCATTTAGACAACTCCTCGC | |
| | | GAGAGCAGGGCAACGCCCGCCGGGTCAAGCAGCTGCTCCGGCTGATGAGGTATT | |
| | | GGCAGCAGCCGCAGTGTTCATGCGGTTACGTCCATGGTCACCCGTTGGAGGCGC | |
| | | GTGCCTTATGCGTTCGTATTACTTATTACGGCATTTGCGCATCCTCGGTTTCGA | |
| | | TGCCGATTGGATCATTGGTGTGCGTACGTGGCCATTTATGGCCCATTGCTGGCT | |
| | | GCAGGTCGGTGCCGTCGCACTCGACGATGACGTCGAGAGATTAACAGCATACAC | |
| | | [chemical structure] | |
| | | ACCTGGCTCTGTACTGGCCGCGCGGCATGCCCGGTGTAGCTGCAGACGCAATGC | |
| | | GGGCCGCCATCGAAGCTGAGGGCGCCTGGACCCTGGCGTTCGAGGCCTACCAGC | |
| | | TGGTAGTGTATGTCAAAGGGCCCCGAGCACCTAAAGTGCGTGCCCTGCCGGATC | |
| | | AGGGCGGGGTGGTCATTGGGGAACTGTTTGATACTGCAGCAACCCGCGAAGGAC | |
| | | GCGTGCAGGACTTTCCTATAGCGCTGATCAAAGACGTCGCAGCTCAGGATGCCG | |
| | | CACGTATTCTTGCTACCCATGCGTGGGGTCGTTATGTGGCTGTATTAAAAGCCG | |
| | | GTGATCGTCCGCCATGGATCTTTCGCGATCCAAGCGGGGCGGTGGAATGTCTGG | |
| | | CGTGGGTCCGCGATGAAGTGACCATCATTAGCAGCGATGTTGCAGCGCAACGAG | |
| | | CTTGGTCCCCTGATCGGCTGGCGATTGACTGGTCGGGACTGGGACGTGTACTGG | |
| | | CACGCGGAAACTTATGGGGAGAAATTTGCCCGCTGGCTGGCGTCACGGCGATTG | |
| | | CGCCAGGTACCGCACGGTGTGATCTCGGTGATGCAGCTCTGAGCCTGTGGCGCC | |
| | | CAGGAGATCATGCACGTCGTAGTCGTCATGATGTTTCCCCACGTGATTTGGCAA | |
| | | GAGTGGTGGATGCTAGCGTTGCAGCCCTGGCTAGAGATCGCAGCGCTATTCTGG | |
| | | TCGAAATCAGCGGGGGACTGGATTCCGCTATCGTTGCCACGTCGCTGGCTCGTT | |
| | | GTGGAGCCCCAGTTGTTGCTGGAATTAACCATTACTGGCCCGAACCGGAGGGTG | |
| | | ATGAACGTCGCTGGGCCCAGGACATCGCAGATCGGTGCGGTTTTCGCCTGATCG | |
| | | CGGGCCAACGTCAGCGGCTGTTGCTGGACGAGGCAAAGCTGCTGAGACATGCAC | |
| | | AGGGCCCGCGACCTGGTCTGAATGCGCAGGACCCGGACCTCGATCACGATCTGG | |
| | | CGGAACAGGCTAAAGCGTTGGGTGCCGATGCACTGTTCTCAGGGCAAGGTGGCG | |
| | | ATGGTGTGTTCTATCAAATGGCAAATGCTGCACTGGCAGCCGATATCCTCATGG | |
| | | GGAAACCTGCTCCTATGGGTAGAGCCGCGTCTTTAGCCGCTGTGGCTCGTCGGG | |
| | | CACGAGCCACGGTCTGGAGTTTGTGCGGCCAGGCTATGTTTCCGTCGCGCGCAT | |
| | | TTGCCGCTGGTATGCCGCCGCCAAGTTTCTTGAGCGCCGGTTTGGCGCCGCCAC | |
| | | CCGTGCACCCGTGGATTGCAGACCAGCGCGGTGTTTCACCGGCGAAACGTATTC | |
| | | AAATTCGGGGGCTGACCAATATTCAATGTGCTTTCGGCGATAGCTTACGGGGCC | |
| | | GAGCAGCAGATCTTTTATATCCGCTTATGGCCCAACCGGTCATGGAACTGTGTC | |
| | | TGTCTATCCCTGCACCGCTGTTGGCAGTAGGCGCATTGGATCGCCCTTTCGCAC | |
| | | GTGCGGCGTTCGCAGATCGATTACCTCCTCGTTCACTCGTTCGACGCTCAAAAG | |
| | | GTGATGTTACCGTGTTTTTCAGCAAAAGCCTTGCAGCAAGCCTGCCGGCCCTTC | |
| | | GTCCTTTCCTGCTGGACGGGCGCCTTGCAGAACAGGGTCTGATCGATCGAGCAA | |
| | | AACTGGAACCTCTGCTGCACCCCGAACCGATGATTTGGCGCGACTCAGTCGGCG | |
| | | AGGTAATGCTGGCAGCGTATCTTGAAGCCTGGGTGCGCGCATGGGAAGCCAAGT | |
| | | TGCGTGTTAGCTAATAA | |
| pEG7134 | Cln2BC | [chemical structure] | 695 |
| | | CGGTAATGGTCGAAGATGATCTGGTTCTGCTGGATGAAGCAGCGGACGCTTATG | |
| | | TCTGTTTGTTGGATGGCGCCAAAGTGGTTAGCGTCCGGGCTGACGGTGCTCTGA | |
| | | GCTTCAATCCCCCACATGCAGCAGAAGATATGATCGCGGGTGGCCTCGTCGAAC | |
| | | CTTCATCAAGTGCCGCGGCGTCAGCAAACCCGCCGGCAAAACTCCCATGTACTC | |
| | | CGCTGGCGCGCTTATCGCGCCCGCGGCATGTAAAAGTGCGTCCGGCTGAAGCGG | |
| | | CCTTGTTCCTGATCCAAGCCTGGGGTGTTGCGCGTGCGGTACGTCGTTGGCCAA | |
| | | TGGCTAGATTATTAGAAGCATTACGTGGAGATCGTGCCGCAGAACCGGCGAAAG | |
| | | GCCGCCGATCGATGGCGGAGGCGTGCGCTGTTTTTGATGCGCTTCTGGCCTGGA | |
| | | GCCCTTTTGACGGTGAATGTTTGTTTCGCTCAGTATTACGACGTAGATTTTTAA | |
| | | TGGCACTGGGCCATTCGCCGGACTTGGTGATAGGCGTGCGTACCTGGCCGTTCC | |
| | | GCGCACATTGCTGGCTGCAGAGCGGAGTGGATGCCCTGGATGATTGGCCGGAAC | |
| | | GGCTCTGCGCATATCGCCCGATTCTGGCAGCTTCTGCAAGCCAGGGTAGATAAT | |
| | | [chemical structure] | |
| | | TGGCCGCCGGGGCAGCCGAGCGTAGAAGCTGATGCACTTCACGCAGCCTTTAAC | |
| | | GGGCAGGGTGGATGGAGCCTGGTTTTGGAACGATTCTGCCTGCGCGTATACGTG | |
| | | CGTGGCGCGGCAGCCCCTGCAGTTACCCTTACCCCGAAAGGAGGCGTGCTCATT | |
| | | GGTGAGATGTTTGATCGGGCTGCCACAGAAACGGGCGCCGTTGCCGCTTATGAT | |
| | | CTGAGCCGCCTGGGAGATGACGACGGTATGGCCGTAGCCCGGCGTGTGGTGGAC | |
| | | GAAGCGTGGGGGAGATATGTGTTGGTGCTGCCAGTTAAAGAACGCCGTCCAGTG | |
| | | GTTTTGCGAGAACCACTGGGCGCGCTGGATGCGCTGATCTGGCGCAAAGGCGAT | |
| | | GTCTGGTGCGTGGGGGCAGACGTACCCCCGGGTCTTGAACCAAAAGATCTGGGT | |
| | | GTGGAAGAGACTAGACTGACGCACCTGATCGCGGAACCGGATCTGGCATCTGCG | |
| | | AGCCTGCCCTTAACCGGCGTCGCGGCAGTGATGCCAGGTACTGCGGTCGATGAA | |
| | | ACCGGCCAGGTGCACCGTCTGTGGACCCCCGCGCGTTTTGCTCGCTCCCCTCGC | |
| | | ACTGACGCGTGGACTGCAGCCGAACGTATTCCGCTGGTTACCCGTGCGTGCATC | |
| | | GCGGCGCTGTCTGCGAATCGAAGTGGTATTCTGTGCGAGATTTCGGGCGGCCTG | |
| | | GATAGCGCTATTGTTGCGACCTCTCTGAAAGCGGAAGGTGCGAAGATTAGTAGC | |
| | | GGGATCAACTTCCATTGGCCCCAGGCTGAAGCAGATGAGCGCCCGTACGCACGC | |
| | | GCTGTTGCGAAAAGCGTGCGAACCCGGTTACAGGTGGTAGCGAGTCGTGTAGCG | |
| | | CCCGTTGACCCGGAAACGTTTGATGAGATCGTGGTCGCGCGACCAAGTTTTAAT | |
| | | GCCATTGATCCAGTCTATGATACCGTACTGGCCCAACGTCTGATTCAGGGCGGT | |
| | | GAAGGAGCCCTGTTTACCGGACAAGGTGGTGACGCAGTTTTCTATCAGATGCCA | |
| | | GCACCACAACTTTCGTTGGATTTGTTGGCTCGTGGCCCCCGCCGCCGCGGTCTT | |
| | | ATGGGATTATCACGCCGCACCAACCGCAGTGTCTGGTCGTTGCTGCGCATGGGC | |
| | | TTACGTGCACCCGTACGAGCAACCTTTCCCTACGGTGCGAGAGGTGCCGATCGT | |
| | | CCTCCGATGCACCCGTGGCTGGAGGACGCGCGTGGTGTTGGGGCCGCGAAACGG | |
| | | ATTCAGATCGAAGCGCTGGTTGCTAACCAGGCCGTGTTTGAAGCATCTCGTCGC | |
| | | GGTGCGGCGGCTCATTTGGTGCACCCACTGCTGTCGCAACCGCTTGTGGAGCTG | |
| | | TGCCTTTCAACCCCAGCGGCCGTGCTGGCGGGTGCCGAACAAGATAGAGCATTC | |
| | | GTGCGTAGCGCTTTTCGTGCGCAACTGCCACGCCTGGTCTTAGATCGTCAAAGC | |
| | | AAAGGAGATCTGAGCGTTTTCTTTGCTAAAGGTGTGGCGCGGAGCTTGCCGGGC | |
| | | TTGCGTCCGCGTCTGCTCGAAGGACGCTTAGCGGCACGTGGCCTGATCGACGTG | |
| | | GAAGCGTTATCACAAGCGATGCAGCCAGAAGCGATGATTTGGCGTGACGGTTCG | |
| | | GCCGAAATCCTGTGCCTTGCTGTTCTGGAATCATGGCTCCGCTCTTGGGAGGCT | |
| | | CGTGGTGCATAATAA | |
| pEG7135 | Cln3BC | [chemical structure] | 696 |
| | | ATTGCGTAAAACAAGGTGGAGTTACGTTTCTGGACGTCCGCGGGGATCGTTACT | |
| | | TCGGCCTGCCGCCGGTGCTGGAACACGCGTTCGTTGCCATTGCCGAGGCGGATT | |
| | | TTCTGCTGAAAGAACCAAATTCACTTCTGGAGCCACTCGAAGCACTGGGTGTCT | |
| | | TAGTGCGAGGCCAAGCCCGCCGTGCCGATCTGACAATTCCGTCTGCAAATCTGT | |
| | | CATGGGTGGATGAGGTCAGCCCGACCCCACCACGTCTTGACCCTGCGTCACTCG | |
| | | TCGCAACCGTCACGTCTGTTATTCGAACGCGTCTGAGCCAAAAGAGTAAGTCCT | |
| | | TGCAGGCTCTCTTGGAAGAGGTCCGTACCCGCCGTCCGGGATCGCCGGCCCATA | |
| | | ATTGGCAGCTGATGCGTCGTCTGACGGCTGGATTCCGTGCATCGCGTGCTTGGG | |
| | | CGCCGATAGAACCCATCTGCCTCCTGGACAGCTTGGCGTTACTGGATTTTCTGC | |
| | | ATCGCCGTGGCCTGTATCCGCATATTGTTTTCGGTGTGATCCGCCAACCGTTTG | |
| | | CCGCTCATTGTTGGGTGCAAGCTGATGATGTAGTCCTGAATGACCGGCTGGATC | |
| | | [chemical structure] | |
| | | [chemical structure] | |
| | | CACGCGACTTGATTCGTCGCCTGCCGAAACTCAAAACCGTCATTGAAACTAGCG | |
| | | GATTGGTGGTACTGCGCCCCGAAAATGGTGCGGGTCTGCGGGTAGGCGGGAACG | |
| | | GTGTGGTCCTGGGTAGCGTCTTTCGCACCGGCGGTGATCGCGAAACTGTTGCGG | |
| | | AATTTTCGGAATCGGAAGCATCCGCGATCGCCACGAGTCGTGGTCAGCAGTTAG | |
| | | TGACAGAGTTCTGGGGTGGCTACCTGGCTGTTCTTGGAGATGCTTCGCGTTCCG | |
| | | AAGTGATGGTCCTGCGAGATCCTTCAGGTGCAATGCCGGCTTATTGTTTAGTTC | |
| | | ATGGCGAAGTCCAGATCATCTGCTCTCGCTTGGAGGTCCTGGAGGACGCAGGAC | |
| | | TGGGGCAGCAGGCGCTGAACTGGGACGTGGTGGCGCAATTACTGGCCTTCCCAA | |
| | | ACCTTCGAGGTCGCTCAACGGGTCTTAAAGGCGTGGAAGAATTACTTCCCGGTT | |
| | | GCCGTCTGACATTTACGGGAGGACTGAAAACCGAAACGCTGACCTGGAACCCGT | |
| | | GGCTTTTTGCCCGCCCATCTGCGCAAGCGCCTGAACGTGGAGTTGCGGCGACCG | |
| | | CCGTGCGTCAGGCGGTGGAAGTAAGCGTTCGAAAATGGGCTGATCAGAGTTCAC | |
| | | CGGTACTTTTGGAATTGTCAGGCGGGCTGGATAGTAGTATCATCGCCTGCTGTC | |
| | | TGGACGAACCGCGCACCGCGGCCACCTTCGTGAACTTTGTCACACCGACGGCCG | |
| | | AAGGCGATGAACGAGGATATGCACGTCTGGTTGCCAAGGCAGCAGATAAACAAC | |
| | | TGATCGAGCAGGACATCCGGGCTGACGAAGTAGATGTTACCCGTCCAAGACCTG | |
| | | GCCGCCATCCTCGTCCGGCCAGTCAGGCGCTGTTACAGCCGCTGGAACAGGCTT | |
| | | GCGCTGAACTGGCACCTCAGTTGGGTGCGAGAAGTTTCTTCTCCGGTCTGGGAG | |
| | | GAGACAACGTGTTTTGTAGCATTGCAACCGCAAGCCCGGCTGCGGATGCACTTT | |
| | | TGACTAGCGGTCTGGGCCGACAGTTCTGGGCCGCAATCGGGGACCTGTGTGCAC | |
| | | GTCATAACTGCACCGTATGGGCAGCCTTAAGCGCCACGCTGAAGAAACTGCTCC | |
| | | GCTCAGATCGTCGTCTGGTGATCAAACCAAACCTGGATTTTCTGTCCTTTCGGG | |
| | | AGGACGCCATAGACCGTCCGGATCACCCATGGCTTGAAGTGGCCGCCGATCGTC | |
| | | TGCCGGGGAAACGCGAACATGTCGCAAGCATTCTGTTGGCGCAAGGCTTCCTGG | |
| | | ATCGTTATGAGCACGCTCAGGTTGCTGCCGTCCGCTTTCCCTTGTTAACGCAAC | |
| | | CGGTTATGGAGGCTTGTCTGCGCGTGCCGACCTGGATGGCAAACCACCAGGGTC | |
| | | GCAATCGGGCGGTCGCACGCGATGCCTTCTTTGATCGCTTGCCCCCGAGAGTAC | |
| | | GTGATCGGCAGACAAAAGGAGGTTTGAACGCGTTTATGGGTGTTGCGTTCGAAC | |
| | | GCAACCGTCAGGCCTTAGCTCGTCATCTGTTAGACGGGCGCCTGGTACAGCGTG | |
| | | GCCTGATAGATGCAGTGGCAATAAAATCGGCGCTGGCCTCACCAGTCCTGGAAG | |
| | | GAGGAGCCATGAACCGCTTACTGTACCTGGCCGATGTCGAATCCTGGGTACGCT | |
| | | CATGGGAAGATGTGTAATAA | |
| pEG7136 | CsegBC | [chemical structure] | 697 |
| | | TCTATGCTGTCATGATCGATGATGATGTAGTTTTCCTGGACGTCGCCACCAATG | |
| | | CATACTTCTGCCTCCCAGCCGTTGGGAGCGTGTTGGCACTCGAAGGTCGTTCGC | |
| | | TGCGTGTGGCGGCTCGCGAACTGGCAGAAGATCTTATTCAGGCAGGCTTAGCAT | |
| | | CCGCGGCTGCGGCAATCGAACCCCCACCGAGCACACCAGCCCCAGTTCGCACTG | |
| | | CGCGTGCGGTATTGGAAGCTCTGCCGGCGCGTGAAAGACCACGTCCACGTCTTG | |
| | | CCCACTGGCGTCAGGCGATTATGGCTGGCTTGGCGTCCCGTGCCGCTGAACGTC | |
| | | GACCATTCGCGCAGAGACTGCCGCCGCCTTCAACGGGGGTTTCACCTCCGGCAT | |
| | | CAGAAGGCCTGCTTGCCGATCTGGATGCGTTCCGTCGACTTCAGCCATGGTTGC | |
| | | CGTTCGACGGTGCTTGTCTGTTCCGTAGCCAAATGCTGCGCGATTATCTCCTTG | |
| | | CGCTGGGTCACCGCGTTGACTGGATTTTCGGTGTACGTACGTGGCCGTTTGGTG | |
| | | CCCACTGTTGGTTGCAGGCCGGCGACCTGGTGCTGGATGATGAGGCCGAACGTC | |
| | | [chemical structure] | |
| | | [chemical structure] | |
| | | AGCAGCGTTTGATGAGATGGTAGAAGCACTGATCGATGCTGGATGGACCTTGGC | |
| | | GTTGCGTGCGTTCAGACTCGCCGTTCTCACCGATGGTCAGGCTCCAGCCGTGTC | |
| | | GCCGCTGATGGGCAGAGGCGGCGTAGCAGGCGTTCTCATCGGCGAAGCGTTTGA | |
| | | TCGTCGCGCCACATTAGGTGGCGCGGTCGCACGTGCCGCGCTGGATGGTTTGGC | |
| | | TGACATCGATCCGCTGGAAGCAGGTCGCCATCTGATTGAAACCGCGTGGGGCGG | |
| | | CTACGTGGGTATGTGGATTGGTCGGGCCGAAGCTGGTCCGACACTGCTGCGCGA | |
| | | TCCTAGTGGCGCGCTCGAAGCCTTAGCGTGGCGCCGTGACGGTGTAACCGTTAT | |
| | | GTCAGCGCGCCCGTTGACGGGGCGCGCAGGCCCAGCTGATTTAGCAATCGATTG | |
| | | GCCACGTATCGTGCAGATTCTGGCCGATCCCATTTCCGCGGCTCTCGGCCCGCC | |
| | | CCCTCTGACTGGCTTAGCGACCATAGACCCGGGCGCGGCGGTTCATGGCGCGGA | |
| | | TGGCCAAGAACGCTCAGTGCTGTGGACCCCAGCTGCAGTTGTCCGTGGTGCTCG | |
| | | TCACCGTCCTTGGCCAAGCCGTCAGGATCTGCGTCGCACCATCGATGCGACTGT | |
| | | CGCGGCACTGGCCTCGGATGCGGGCCCGATTGTCTGCGAAATTTCAGGAGGTCT | |
| | | GGACTCGGCCATAGTTGCGACTAGCCTTGCGGCGTCCGGTCTGGGTCCGCAGCT | |
| | | GACAGTGAATTTTTACGGTGACCAGCCTGAAGCTGATGAACGCGGATACGCTCA | |
| | | AGCCGTCGCCGAACGTATCGGTGCGCCTCTGCGGACCCTTCGTCGAGAGCCGTT | |
| | | CGCGTTCGATGAAACCGTGCTGGCAGCCGCTGGACAGGCCGCACGTCCGAATTT | |
| | | TAACGCCCTCGATCCTGGATACGATGCCGGGCTCGTGGGTGCCCTGGAAGCTAT | |
| | | CGATGCTCGTGCATTATTTACGGGCCATGGCGGTGATACCGTGTTTTATCAAGT | |
| | | GGCGGCCAGTGCCTTGGCCGCAGACTTACTGGGCGGCGCACCATGTGAAGGTAG | |
| | | CCGCCGTGCACGTTTAGAGGAAGTAGCTCGGCGGACCCGACGCTCGATTTGGAG | |
| | | TCTTGCATGGGAAGCGTTTTCTGGTCGACCCAGCACTGTAAGCATTGAAGGTCA | |
| | | GTTGCTTCGACAGGAAGCAGAGAGAATTCGGCGCGTCGGCCTGACCCATCCGTG | |
| | | GGTTGGAGGCCTGTCGTCTGTGACCCCTGCGAAACGCCAGCAAATCCGCGCGCT | |
| | | GGTCAGTAACCTGAACGCGCATGGCGCCACTGGTCGCGCCGAACGCGCTAGAAT | |
| | | CGTGCACCCGCTTTTAGCTCAGCCGGTGGTTGAAGCCTGCCTGGCGATTCCTGC | |
| | | CCCTATCCTCAGTGCGGGCGAAGGAGAACGCTCATTTGCGAGAGAAGCCTTTGC | |
| | | AGACCGTTTGCCACCGAGCATTGTGGGCCGCCGAAGCAAAGGGGAAATTAGTGT | |
| | | GTTTCTTAACAGATCTTTAGCAGCCAGCGCCCCCTTTCTGCGTGGCTTTTTACT | |
| | | TGAAGGACGGCTGGCGGCTCGCGGGCTGATTGATCGTGACGAACTTGCAGCCGC | |
| | | GCTGGAACCGGAAGCAATCGTCTGGAAGGATGCGTCACGCGACCTGCTTACTGC | |
| | | GGCGGCCCTGGAGGCGTGGGTCAGACATTGGGAAGCACGTATTGGCGAGGGGGA | |
| | | AGCAGCGGAAGGTGAGCGTGCTGCCGGTCGTGGTACCGCAGCGACGGGACCGCG | |
| | | TACAAGCGCGCGGAAGGCGAACACCCGTTAATAA | |
| pEG7137 | PadeK | [chemical structure] | 698 |
| | | ACCATTATAAAGCCTTTGGGTTTAGAATTGAAAGCGATTTCGTGCTCCCGGAAC | |
| | | TTCCGCCCGCAGGCGAACGCGAACCGCTCGATAATATTACGGTTCGTCGTACCG | |
| | | ACCTGCAGCCGCTCTGGAATTCTAGTATCCATTTTTACGGAAACTTTGCCATTC | |
| | | TGGATCACGGACGCACGGTTATGTTTCGAGTTCCGGGTGCTGCTATCTATGCGG | |
| | | TACAGGATGCTAGCAGCATATTAGTGTCCCCATTCGATCAGGCAGAAGAAAACT | |
| | | GGGTACGTCTTTTTATTCTGGGTACCTGTATTGGGATCATCCTGCTGCAGCGTA | |
| | | AGATTATGCCGCTGCACGGTAGCGCCGTTGCCATTGATGGCAAAGCCTACGCGA | |
| | | TTATCGGCGAATCTGGTGCCGGCAAAAGCACTCTTGCACTGCATCTTGTCAGTA | |
| | | AGGGTTATCCATTGCTTTCGGATGATGTGATTCCGGTCGTTATGACCCAGGGCT | |
| | | CCCCCTGGGTGGTGCCGTCGTACCCGCAACAAAAACTTTGGGTGGACACTCTGA | |
| | | AGCACATGGGAATGGATAATGCAAACTATACGCCGCTGTACGAACGTAAAACGA | |
| | | AGTTCGCGGTGCCCGTGGGCAGTAATTTCCACGAAGAACCGCTGCCGTTAGCTA | |
| | | GCATTTTCGAGCTTGTCCCGTGGGATGCGGCAACGCACATTGCCCCGATCCAAG | |
| | | GGATGGAACGCTTTCGTGTCCTGTTCCACCACACTTATCGGAACTTTCTGGTTC | |
| | | AGCCGCTGGGTCTTATGGAATGGCATTTTAAAACTCTGAGCTCGTTCGTTCACC | |
| | | AAATTGGAATGTATCGTCTGCATAGACCTATGGTCGGATTCAGTACCTTAGATT | |
| | | TAACGTCGCACATTCTGAATATAACGCGTCAGGGAGAGAACGATCAATAATAA | |
| pEG7138 | ThcoK | [chemical structure] | 699 |
| | | TCGCGCGTTCGGCCTGCGCATAGACTCAGATATTCCGCTGCCAGAATTAGGGGA | |
| | | CGGTACGCGCCCTGATGGTGACGCGGATCTGACGGTCGTCCGGTGTGGGGAAGC | |
| | | GGAGCCGGAATGGGCTGAAGGTGGTGGCGGGGGTCGTCTGTATGCCGCTGAAGG | |
| | | CATTGTATCTTTTCGCGTGCCGCAGACGGCAGCGTTCCGTATTACTAATGGAAA | |
| | | TCGCATCGAGGTGCATGCCTACTCGGGGGCTGATGAGGATCGAATACGCCTGTA | |
| | | CGTGTTAGGGACCTGTATGGGAGCGCTGTTACTGCAACGTAGAATCTTACCGCT | |
| | | TCATGGTTCGGTCGTCGCCCGTGATGGTCGTGCGTATGCCATAGTTGGCGAAAG | |
| | | CGGAGCGGGCAAATCCACGATGAGTGCAGCACTTCTCGAACGTGGATTCCGCCT | |
| | | CGTTACGGATGACGTGGCCGCCATCGTGTTCGATGAGCGTGGGACCCCACTGGT | |
| | | TATGCCGGCTTATCCACAGCAAAAACTGTGGCAGGATTCCCTGGACCGTCTGCA | |
| | | AATTGCGGGCTCGGGCCTTCGTCCGCTGTTCGAACGCGAAACGAAATACGCTGT | |
| | | ACCCGCGGATGGGGCATTCTGGCCCGAACCGGTTCCATTGGTGCACATTTACGA | |
| | | ACTGGTTCATAGCGATGGTCAAACGCCTGAACTGCAGCCGATTGCCAAATTAGA | |
| | | GCGTTGCTATACCTTGTATCGCCACACATTTCGTAGAAGCCTGATCGTCCCCAG | |
| | | CGGCTTAAGCGCCTGGCATTTTGAAACGGCAGTGAAACTTGCGGAGAAAACGGG | |
| | | GATGTACCGTCTTATGCGCCCGGCCAAAGTTTTCGCGGCTCGCGAATCTGCTCG | |
| | | GCTGATTGAAACTCACGCCGATGGTGAAGTGTCACGTTAATAA | |
| pEG7139 | StspM | [chemical structure] | 700 |
| | | CACCGTCCTGAGCCTGGCCGAACGGACAGGTACCGATCCAGATCTGCTGGGCCG | |
| | | TGTGTTGCGCTTCCTCGCTTGTCGTGGTGTTTTCGCCGAGCCTCGCCCAGGTAC | |
| | | TTATGCCTTGACCCCTCTGAGCTTAACTTTACTGGAAGGCCATCCGTCCGGTTT | |
| | | AAGAGAATGGTTGGATGCGTCGGGTGCGGGAGCGCGCATGGACGCGGCAGTTGG | |
| | | AGATCTGCTTGGCGCCCTCCGCTCGGGTGAACCGAGCTATCCACGTCTGCATGG | |
| | | TCGTCCGTTTTATGAAGATCTGGCGCTGCACAGCCGAGGCCCTGCTTTTGATGG | |
| | | ACTGCGTCATACGCACGCCGAATCGTATGTTGCCGACCTGCTGGCAGCCTACCC | |
| | | GTGGGAACGCGTTCGTCGCGTGGTTGATGTAGGCGGTGGGACCGGCGTATTGGT | |
| | | CGAGGCGCTTATGAGAACTCATGCGACCCTCCGTACAGTACTGGTCGATCTTCC | |
| | | AGGCGCGGTGGCTACCGCTACCGCTCGAATTGCGGCTGCGGGTTTTGGCAATAG | |
| | | ATATACACCGGTCACGGGTTCCTTCTTTGATCCGCTGCCTGCGGGGGCGGATGT | |
| | | TTACACCCTGGTTAACGTGGTTCACAACTGGAACGATGAGCGTGCCTCAGCTCT | |
| | | GCTGCGTCGGTGTGCGGATGCGGGTCGCCGCGACAGTACGTTTGTTATCGTGGA | |
| | | ACGCTTAGCGGACGATGCAGACCCTCGTGCCATCACCGCCATGGACCTCCGTAT | |
| | | GTTCCTTTTTCTGGGCGGTAAAGAGCGCACGGCCGCACAGATTCGCGAAGTAGC | |
| | | TAGTGCGGCTGGCATGGCCCACCAAAGCACCATTAAAACACCGTCTGGCCTCCA | |
| | | CTTACTTGTTTTCCGTAAGAAACGTTTCGCTGCTCGCGGTCACGGTCGTCGCAT | |
| | | GGTGACCTAATAA | |
| pEG7141 | LenG | [chemical structure] | 701 |
| | | ACAAGTGGTTTGATATTAACTTCCTGGAAATGTATACACGCAGCTGCCTGAAAA | |
| | | CTTTTGGCTACTTCGACGAAATTCTGATCGTGAAGAAACGCATCGAGGTCCTGA | |
| | | AGAACGTGCTTGAAAAACAGTACTTGTCTACCAATGATTATGCTGAGGAGTTTT | |
| | | TCGAGCTGAATACCACCTTGGAGAGCATAAAAGAATACATCAAACTGAATCTGG | |
| | | TCATCGAGAAAGAACCGATCTCAATTTGCATTATGGTCAAAAACGAAGAACGTT | |
| | | GCATCAAGCGCTGCATTGATAGCGTTGAAATCCTCGCCGAGGAGATAATCATTA | |
| | | TCGATACCGGCTCTACGGATAATACCATTAACATTATTGAGGAATGCGCAAACG | |
| | | ACAAAATTAAAGTGTTCTCAAAAGAATGGCGTAACGATTTTTCCGAAATTCGGA | |
| | | ACTATGCCATCGAGAAAGCGAGTAGCGAATGGCTGGTGTTTATAGATGCCGATG | |
| | | AATATCTGGACGAAGCCTCGGTGCTCAACCTGCTCAGTACGCTCAACATCTTTA | |
| | | ACAATCATAAGCTCAAAGACTCTATTGTCCTGTGCCCCATGATCAACGAAGCCA | |
| | | ATAACACCATCCATTTCCGTACCGGGAAATTTTTCAGAAAAGACTCCGGGATTA | |
| | | AATTCTTTGGTACCTGCCATGAGGAGCCCCGCATTAAAGGCATGCCGAATTCTA | |
| | | CCCTGCTGATTCCGATCAAGGTTGATTATCTGCATGACGGCTACCTGGCAAAAG | |
| | | TACAATCAAATAAAGACAAGAAAACCCGTAACATCGAACTGTTAGAAGGTATGG | |
| | | TGGAACTGGAACCGGATAATCCTCGTTGGGCGTATATGTTTGTGCGCGACGGAT | |
| | | TTGCAATCCTCGATAACGAATACATTGAGAAAACTTGTTTGCGGTTTTTACTGC | |
| | | TGGACAAAAACGTACGCATCTGCGTCAACAACCTGCAAGACCATAAATTCACTT | |
| | | TGTCACTCCTGACGATCCTGGGCCGCCTCTATCTGCGCGAGTGCGAATTCGAGA | |
| | | AAAGCAATCTGATAATTCGCATTCTTGACGAACTCATCCCTAATAGTCTGGATG | |
| | | GTAAATTTCTGGCATTCATGGAGCGATTCAGCAAACTGAAAATTGAGATTAATA | |
| | | CGCTGTTAACGGAGGTCATCGAATATCGTCGTAACCACGAAGTAGATGAAACCA | |
| | | GTTTAATCAACACACAAGGCTACCATATCGACTATGTTCTGTCGATTTTGCTGT | |
| | | TCGAAACGGGTAATTACGCGCAAAGTAAGAAATACTTCGATTTCCTGCAGGAGA | |
| | | ACCATTTTCTGGAAGAACTGTTTCAAGACAGCTCTTATTCTATCATACTGAAAA | |
| | | TGCTCGAGTCAGTAGAAGATTAATAA | |
| pEG7142 | PalS | [chemical structure] | 702 |
| | | GATGAAAGATAACTATGCGGACTCTAATCTGTTCAAGGATTTGAATCTGATCCA | |
| | | CAATATCTCCAACGACATCCAAATTGGAATTAATTGCGATTTCTCTGAAATGCT | |
| | | GGGAGAACTGGTAGGTAATTACGATTCCCTGAACTATCCGTCAATCACCTGTGG | |
| | | TATTCTGACGTATAATGAAGAACGCTGCATTAAACGTTGTCTGGAAAGTGTGGT | |
| | | GAACGAATTCGATGAGATTATTGTCTTGGATAGTGTATCCGAGGACAATACCGT | |
| | | GAAAATTATCAAGGAGAATTTCAACGATGTCAAAGTCTACGTCGAGCCATGGAA | |
| | | GAACGATTTTTCATTTCACCGCAACAAGATCATTAATCTCGCAACGTGCGACTG | |
| | | GATCTACTTTATCGACGCGGATAATTATTATGATTCGAAGAACAAGGGTAAAGC | |
| | | CATGCGCATCGCTAAGGTTATGGATTTCTTGAAAATCGAAGGCGTTGTGAGCCC | |
| | | AACGGTCATTGAGCATGACAATAGCATGAGCCGTGATACCCGTAAGATGTTTCG | |
| | | TCTGAAAGATAACATTCTGTTTAGCGGTAAAGTTCATGAAGAACCGGTGTATGC | |
| | | CAATGGTGAGATCCCCCGGAACATCATAGTAGACATCAACGTGTTTCACGACGG | |
| | | CTATAACCCAAAGATTATCAACATGATGGAAAAGAACGAGCGCAATATCACCCT | |
| | | GACTAAAGAGATGATGAAGATCGAACCGAACAATCCGAAATGGCTGTACTTCTA | |
| | | TAGCCGCGAACTCTATCAGACGCAACGTGACATTGCCCTTGTGCAAAGTGTACT | |
| | | GTTCAAGGCACTGGAACTGTATGAAAACAGTTCATATACGCGTTATTATGTTGA | |
| | | CACCATTGCCTTACTGTGCCGAGTGCTGTTCGAATCTAAAAACTACCAGAAACT | |
| | | TACGGAATGTCTGAACATCCTGGAGAACAATACGCTTAACTGTTCCGATATCGA | |
| | | TTACTATAATTCAGCGCTGCTGTTCTACAACCTGTTACTGCGCATCAAGAAAAT | |
| | | TAGCTCCACCCTGAAGGAGAACATTGATATGTACGAACGTGACTATCATAGCTT | |
| | | TATCAACCCCTCGCATGATCACATTAAGATTCTGATATTAAATATGCTCCTGCT | |
| | | GCTCGGCGATTACCAGGATGCCTTTAAGGTTTACAAGGAGATCAAGTCCATTGA | |
| | | GATTAAAGATGAGTTTCTGGTGAACGTGAACAAATTCAAAGACAATCTTCTGAG | |
| | | CTTCATTGACTCCATTAACAAAATTTAATAA | |
| pEG7143 | SgbL | [chemical structure] | 703 |
| | | GACCTTCTGCGCCAAGCATTACACGCAACTGGTACAGGTGCTCGTTGGGCTGTA | |
| | | GAGGCGGACGAGATGTGGTGCCGTGTCGCCCCGGTGCCTGGAACTCGCCGCGAG | |
| | | CAAGGATGGAAGCTTCATGTAAGCGCGACGACCGCGAGTGCGCCCGAAGTCTTA | |
| | | ACTCGTGCATTAGGCGTACTTCTGCGTGAAAAGTCCGGGTTCAAATTTGCCCGC | |
| | | TCACTTGAACAAGTCTCGGCCTTGAATAGTCGTGCTACGCCCCGTGGTAGTTCG | |
| | | GGTAAATTTATCACAGTATACCCCCGCTCAGACGCCGAAGCCGTCGCACTGGCT | |
| | | CGCGACCTGCATGCGGCAACGGCCGGCTTGGCTGGGCCCCGTATTCTTTCCGAT | |
| | | CAACCATACGCCGCGCACAGCCTGGTGCATTATCGTTATGGGGCTTTCGTGGGA | |
| | | CGTCGTCGCCTTTCAGATGACGGGCTTTTAGTTTGGTTTATTGAGGACCCAGAT | |
| | | GGCAATCCCGTGGAGGATAAACGCACCGGACGTTATGCGCCGCCTCCCTGGGCT | |
| | | GTATGTCCGTTTCCTGCGAGCGTCCCCGTTGCGCCCCATGACGGCGAAGCTACG | |
| | | AGTCGTCCTGTTGTCTTAGGTGGTCGCTTCGCGGTTCGTGAAGCCATCCGTCAA | |
| | | ACGAATAAAGGGGGCGTCTATCGCGGGTCGGACACACGCACTGGCACCGGCGTG | |
| | | GTTATCAAAGAGGCGCGCCCACATGTTGAAGGAGACGCCAGTGGGGGCGATGTT | |
| | | CGTGACTGGCTTCGCGCAGAGGCGCGTACGCTTGAAAAATTAAAAGGTACCGGC | |
| | | TTGGCACCAGAAGCGGTGGCGTTGTTTGAGCACGCTGGCCACTTGTTCTTAGCC | |
| | | CAAGACGAGGTCCCGGGGGTTACGTTACGCACCTGGGTAGCGGAACACTTCCGT | |
| | | GACGTTGGAGGAGAGCGCTATCGTGCCGACGCCCTGGCTCAGGTGGCTCGTTTA | |
| | | GTTGATTTAGTCGCGGCTGCTCATGCACGTGGCTTGGTCCTGCGCGATTTTACA | |
| | | CCAGGGAACGTGATGGTCCGTCCAGACGGCGAATTGCGCCTTATTGATTTAGAG | |
| | | CTGGCGGTTCTTGAGGATGAGGCCGCATTGCCTACCCACGTCGGTACCCCGGGG | |
| | | TTTTCGGCACCCGAACGCCTTGCAGACGCTCCAGTGCGTCCTACTGCTGACTAC | |
| | | TATTCTCTGGGAGCCACAGCTTGTTTTGTCTTGGCCGGTAAAGTCCCTAATTTA | |
| | | CTTCCTGAAGAACCCGTGGGTCGCCCATCGGAGGAGCGTCTTGCTGCCTGGTTG | |
| | | ACTGCATGTACACGTCCGCTGCGCCTGCCAGATGGAGTCGTTGACATGATCTTG | |
| | | GGGTTAATGCGCGATGATCCTGCAGAGCGCTGGGACCCATCCCGCGCGCGTGAA | |
| | | GCACTGCGCAAAGCTGACCCGACAGCACGCCCCGGGGATGCTGATCGCACTGCA | |
| | | GTACGTCGTACGGGTTCGTCGGCAGTGGCCGGGCCAGTTCCTGACTCACGTACA | |
| | | GCAGATGGTCGTACAGCGGACGGCCGTTCCGCGGATGAAGTTGTGGCAGGTCTT | |
| | | GTCGATCACTTAGTCGATAGTATGACCCCGGCAGATGATCGTCTGTGGCCGGTA | |
| | | AGCACTCTTACGGGAGAATCGGATCCATGTACAGTCCAGCAAGGCGCTGCTGGG | |
| | | GTGCTTGCGGTGTTGACCCGCTACTTCGAATTGACGGGCGATCCGCGCTTACCA | |
| | | GGCTTATTGTCGACAGCCGGACGTTGGATCGCAGACCGCACGGATGTTCGTTCA | |
| | | CCTCGTCCGGGATTACATTTCGGGGGACGCGGAACAGCCTGGGCCTTATACGAC | |
| | | GCGGGGCGTGCAGTCGACGATCGTCGCTTGGTGGAACATGCTCTGGACTTAGCA | |
| | | TTAGCCCCGCCCCAAGCGACTCCTCATCACGATGTCACGCATGGGACTGCGGGC | |
| | | TCAGGCTTAGCCGCCTTGCACCTGTGGCAGCGTACTGGAGATACTCGTTTCGCG | |
| | | GATTTAGCAGTAGAGGCAGCTGATCGCTTAACAGCTGCAGCTCGTCGCGAGCCT | |
| | | TCGGGTGTTGGATGGGCAGTACCTGCAGAGGCCGACTCCCCAGAAGGAGGCAAG | |
| | | CGTTACCTGGGCTTCGCTCATGGCGCAGCTGGGATTGGGTGCTTCTTATTGGCT | |
| | | GCGGCGGAACTTAGTCGTCAACCCGATCATCGTGCAACTGCTTTGGAAGTTGGC | |
| | | GAAGGCCTGGTTGCTGATGCTGTTCGCATCGGAGAGGCGGCACAGTGGCCTGCG | |
| | | CAATCCGGGGACTTGCCGACAGCGCCTTACTGGTGCCATGGGGCGGCAGGTATC | |
| | | GGGACATTTCTTGTACGCTTATGGCAGGCGACCGGGGACGATCGCTTCGGTGAT | |
| | | CTGGCCCGCGGGAGTGCTCACGCTGTGGCCGAACGTGCTAGTCGCGCCCCATTG | |
| | | GCGCAATGTCACGGTTTGGCTGGAAACGGAGATTTCTTGTTGGATTTGGCAGAC | |
| | | GCGACAGGCGATCCTGTGCATCGCGACACCGCGGAAGAGTTAGCAGGGTTGATC | |
| | | TTGGCCGAAGGAACCCGTCGTCAGGGACATGTCGTTTTCCCTAATGAGTATGGG | |
| | | GAAGTATCATCTTCATGGTCCGACGGTAGTGCGGGGATTCTTGCGTTCCTTCTG | |
| | | CGTACGCGTCATACGGGCCCTCGCCATTGGATGGTAGAACAACGTGGGTAATAA | |
| pEG7144 | RaxST | [chemical structure] | 704 |
| | | CTGCCTCGTGCGGGGAGTTCATTACTGGCTGCGTTACTGCGTCAAAATCCGCAG | |
| | | CTGCATGCCGATGTTACATCTCCGGTGGCGCGCCTTTACGCGGCCATGCTGATG | |
| | | GGTATGAGTGAAGAACACCCGAGCAACGTGCAGATTGACGATGCCCAACGTGTC | |
| | | CGTCTGTTACGTGCAGTATTTGATGCGTATTATCAGAACCGTCAGGAACTGGGG | |
| | | ACAGTGTTCGATACTAACCGCGCATGGTGCTCTCGCCTCACGGGCCTGGCGCGT | |
| | | CTGTTTCCGCGTAGTCGCATGATCTGCTGTGTACGCGATGTGGGCTGGATTGTT | |
| | | GATTCTTTTGAACGCCTGGCGCAGTCGCAGCCGTTACGCCTTTCGGCCCTGTTC | |
| | | GGTTACGACCCCGAGGATTCGGTTAGCATGCACGCTGACTTACTCACTGCGCCT | |
| | | CGCGGGGTAGTGGGCTACGCCCTGGATGGTTTACGTCAAGCGTTTTATGGAGAT | |
| | | CACGCGGATCGTCTGCTGTTGTTACGTTATGATACGCTGGCACAGCGTCCTGCA | |
| | | CAAGCCATGGAACAGGTATATGCATTCCTGCAGCTCCCTGCCTTTGCACATGAT | |
| | | TATGCCGGTGTTCAGGCCGAAGCGGAACGCTTTGATGCCGCCCTGCAAATGCCT | |
| | | GGTTTGCACCGCGTGCGTCGTGGTGTTCACTATGTTCCGCGACGTTCGGTTTTA | |
| | | CCGCCTGCCCTGTTTGACCAGCTGCAGGAACTTGCATTCTGGGAAAGTGCACCC | |
| | | AGCCATGGAGCGCTGCTCGTGTAATAA | |
| pEG7145 | ComQ | [chemical structure] | 705 |
| | | TCAGTAACAAAGACCTGTCGCAACTCCTGTGTTCCTTCATTGATTCAAAGGAAA | |
| | | CTTTCAGTTTTGCCGAGAGCGCTATACTGCATTATGTAGTATTCGGCGGTGAGA | |
| | | ACCTGGACGTAGCTACCTGGCTGGGCGCCGGAATTGAAATTCTGATCCTGAGCA | |
| | | GCGATATCATGGACGACCTGGAGGACGAGGATAACCATCATGCGTTGTGGATGA | |
| | | AAATTAACCGCAGCGAGAGCTTGAATGCGGCCCTGTCCTTATACACCGTCGGCT | |
| | | TAACGAGCATCTATTCCCTGAACACAAATCCGTTGATATTTAAGTATGTGCTGC | |
| | | GCTACGTCAATGAGGCCATGCAGGGTCAGCATGATGATATAACCAATAAAAGCA | |
| | | AAACCGAAGATGAATCGCTTGAAGTGATTCGCCTTAAATGCGGCAGCCTGATCG | |
| | | CCCTGGCAAATGTCGCGGGCGTGCTGTTAGCCACGGGCGAGTACAATGAAACAG | |
| | | TTGAACGTTACTCTTATTACAAAGGCATCGTGGCGCAAATTTCCGGCGACTATC | |
| | | ACGTGCTGCTGTCAGGAAACCGGAGCGATATCGAGAAAAACAAACAGACACTGA | |
| | | TTTACCTGTATCTGAAACGCCTGTTTAACAACGCGAGCGAGGAATTGCTGTATC | |
| | | TGTTCTCCCATAAAGATTTGTACTATAAAGCCCTGCTCGACCGTGAAAAGTTTG | |
| | | AAGAAAAACTGATCCAGGCCGGGGTGACGCAGTACATCAGCGTTCTGCTCGAAA | |
| | | TATATAAGCAGAAGTGCTTCTCCACCATAGAACAGCTGAACTTAGATAAAGAAA | |
| | | AGAAAGAGCTGATCAAGGAGAGCCTGCTGTCATATAAGAAAGGCGACACCCGTT | |
| | | GCAAGACCTAATAA | |
| pEG7146 | KgpF | [chemical structure] | 706 |
| | | CTCCATAAGAGTAAAAACTTGATGTATATGAAAGCCCACGAAAACATCTTCGAA | |
| | | ATCGAGGCGCTGTACCCGCTGGAATTGTTCGAGCGTTTTATGCAGTCCCAAACC | |
| | | GATTGCTCCATCGATTGTGCCTGTAAAATTGATGGTGACGAATTGTATCCCGCC | |
| | | CGTTTTAGTCTGGCCCTGTATAACAACCAGTATGCCGAAAAGCAAATTCGCGAA | |
| | | ACCATCGACTTCTTCCATCAGGTAGAGGGTCGGACCGAGGTGAAACTGAACTAT | |
| | | CAGCAACTGCAGCACTTCCTGGGTGCTGACTTCGATTTTAGCAAAGTGATTCGA | |
| | | AACCTGGTGGGTGTGGATGCACGCCGCGAACTGGCTGATTCCCGGGTTAAACTG | |
| | | TATATTTGGATGAACGATTACCCAGAGAAAATGGCGACCGCCATGGCATGGTGC | |
| | | GATGATAAGAAGGAATTGTCGACGTTGATAGTAAATCAGGAGTTTCTGGTCGGG | |
| | | TTCGATTTTTATTTCGATGGTCGCACGGCAATAGAATTATACATTAGTCTGTCA | |
| | | TCCGAAGAATTTCAGCAGACACAAGTTTGGGAACGCCTCGCAAAGGTAGTGTGC | |
| | | GCCCCAGCGCTGCGCCTTGTTAATGATTGCCAGGCGATCCAGATTGGCGTGAGC | |
| | | CGTGCCAATGATAGTAAGATCATGTATTACCATACCCTTAATCCGAACTCGTTT | |
| | | ATCGACAATCTGGGCAATGAAATGGCAAGCAGAGTTCACGCGTATTACCGACAT | |
| | | CAACCGGTTCGCTCTCTGGTAGTATGCATACCAGAACAGGAGTTGACCGCCCGG | |
| | | TCCATACAGCGCTTAAACATGTATTACTGTATGAACTAATAA | |
| pEG7147 | TgnB | [chemical structure] | 707 |
| | | CCTGGATCTGACCGTGGATTATATTATTAATCGCTATAATCATACCGCTAAATT | |
| | | TTTTCGTCTGAATACCGATCGTTTTTTTGATTATGATATTAATATTACCAATAG | |
| | | CGGTACCAGCATTCGTAATCGTAAATCTAATCTGATTATTAATATTCAGGAAAT | |
| | | TCATAGCCTGTATTATCGCAAAATTACCCTGCCGAATCTGGATGGCTATGAAAG | |
| | | TAAATATTGGACCCTGATGCAGCGCGAAATGATGAGTATTGTTGAAGGCATTGC | |
| | | AGAAACCGCTGGCAATTTTGCACTGACCCGTCCGTCTGTGCTGCGCAAAGCTGA | |
| | | TAATAAAATTGTGCAGATGAAACTGGCAGAAGAAATTGGTTTTATTCTGCCGCA | |
| | | GAGTCTGATTACCAATTCAAATCAGGCGGCAGCCTCATTTTGCAATAAAAATAA | |
| | | TACCAGCATTGTGAAACCGCTGAGTACCGGCCGCATTCTGGGTAAAAATAAAAT | |
| | | TGGCATTATTCAGACCAATCTGGTTGAAACCCATGAAAATATTCAGGGCCTGGA | |
| | | ACTGTCTCCGGCTTATTTTCAGGATTATATTCCGAAAGATACCGAAATTCGTCT | |
| | | GACCATTGTTGGTAATAAACTGTTTGGCGCCAATATTAAATCAACCAATCAGGT | |
| | | TGATTGGCGCAAAAATGATGCACTGCTGGAATATAAACCGGCCAATATTCCGGA | |
| | | TAAAATTGCCAAAATGTGTCTGGAAATGATGGAAAAACTGGAAATTAATTTTGC | |
| | | GGCGTTTGATTTTATTATTCGTAATGGTGATTATATTTTTCTGGAACTGAATGC | |
| | | CAATGGTCAGTGGCTGTGGCTGGAAGATATTCTGAAATTTGATATTTCAAATAC | |
| | | CATTATTAATTATCTGCTGGGTGAACCGATTTAATAATAA | |
| pEG7149 | PapB | [chemical structure] | 708 |
| | | TGATTCATTTCCATCCGTACAAACTGTTCGAGGTGGATTCAAAAACCTTCTTCT | |
| | | ATAACGTAGTCACCAACGCGATTTTTGAAATTGATAGCCTGATAATCGACATTC | |
| | | TTCACTCAAAAGGTAAAAATGAGGAGCACGTTGTGAAAGATTTGGCTGAACGCT | |
| | | ATGAGCTGTCTCAGGTTCGCGAAGCGATCCAGAACATGAAAGAGGCATACATTA | |
| | | TAGCAACCGATGCTAACATCTCCGACGTAGAGAAGATGGGTATCTTAGATAACT | |
| | | CGCAGCGCGTTTTTAAACTGTCTAGCCTGACGCTCTTTATGGTGCAGGAATGCA | |
| | | ACCTGCGGTGTACGTATTGTTACGGCGAAGAAGGAGAATACAACCAGAAAGGTA | |
| | | AAATGACGTCCGAAATCGCCCGGAGCGCAGTGGATTTTCTGATTCAACAGAGTG | |
| | | GTGAAATCGAACAGTTGAACATCACATTCTTTGGAGGCGAACCGCTGCTCAACT | |
| | | TTCCATTAATACAAGAAACCGTGCAGTATGTGCACGAACAGAGCGAGATCCATA | |
| | | ACAAGAAATTTAGCTTTTCCATCACCACCAATGGCACGCTCATTACCCCCAAAA | |
| | | TCAAAAACTTCTTCTATAAACACCACTTTGCAGTCCAGACTTCTATCGATGGTG | |
| | | ATGAAAAGACGCACAATTTCAATCGCTTCTTCAAAGGAGGCCAGGGCTCTTATG | |
| | | ATCTGCTGTTAAAGCGGACGGAAGAAATGCGCAATGACCGTAAAATTGGTGCAC | |
| | | GTGGAACCGTGACCCCTGCCGAGCTGGACCTCTCAAAATCATTTGACCACTTAG | |
| | | TTAAACTCGGCTTTCGCAAAATCTACTTATCACCCGCTTTATATAGTCTCTCTG | |
| | | ACGATCACTACGACACCCTGAGCAAAGAGATGGTCAAACTTGTTGAACAATTCC | |
| | | GTGAGCTGCTGGAGCGTGAAGATTACGTCACCGCGAAGAAAATGTCTAATGTTC | |
| | | TGGGTATGTTATCGAAGATTCACTCCGGTGGCCCGCGCATTCATTTTTGCGGTG | |
| | | CCGGCACTAATGCTGCCGCTGTCGATGTCCGCGGCAACCTTTTCCCGTGTCATC | |
| | | GTTTCGTGGGTGAAGATGAATGTTCAATCGGTAACCTGTTCGACGAGGACCCGC | |
| | | TGTCAAAACAGTACAACTTTATAGAGAATTCTACAGTACGCAACCGTACTACGT | |
| | | GTTCGAAATGCTGGGCGAAGAATCTGTGCGGCGGTGGTTGTCACCAAGAAAATT | |
| | | TCGCCGAGAATGGTAATGTGAACCAGCCAGTGGGCAAATTATGCAAAGTGACCA | |
| | | AAAACTTCATCAACGCGACCATCAATCTGTACTTGCAACTTACTCAAGAACAAC | |
| | | GCAGCATTCTGTTCGGCTAATAA | |
| pEG7152 | PcpXY | [chemical structure] | 709 |
| | | AGATCACGCTGAAATGCAATCTGGCATGTTCGCACTGTGGAAGTCGTGCCGGGC | |
| | | ACACGCGAGCAAAAGAACTGTCCACACAGGAAGCGCTGGATCTGGTCCGTCAGA | |
| | | TGGCTGATGTCGGCATTATCGAAGTTACTCTGATTGGGGGTGAAGCGTTCCTGC | |
| | | GTCCAGACTGGCTGCAGATTGCCGAGGCGATAACGAAAGCCGGGATGCTGTGCA | |
| | | GCATGACTACGGGCGGTTATGGCATATCGCTGGAAACCGCCCGCAAAATGAAAG | |
| | | CGGCAGGAATCGCGAGCGTGAGCGTTAGCATCGATGGCTTGGAGGAAACCCATG | |
| | | ATCGCTTACGCGGTCGCAAAGGCTCTTGGCAGGCTGCGTTTAAAACAATGAGCC | |
| | | ATTTGAGAGAAGTGGGCATCTTCTTTGGCTGTAACACCCAGATTAACCGTCTGT | |
| | | CGGCCCCTGAATTTCCGCTGATATATGAACGCATCCGTGACGCCGGGGCACGTG | |
| | | CCTGGCAGATCCAGCTTACGGTGCCGATGGGCCGCGCTGCCGATAACGCAAATA | |
| | | TCCTTCTGCAACCGTACGAACTGCTTGATCTGTATCCGATGATTGCTCGAGTGG | |
| | | CCCGCCGGGCCCGTCAAGAGGGCGTGCAAATCCAGCCAGGTAATAATATTGGGT | |
| | | ATTACGGCCCTTACGAACGTCTTTTACGTGGCCGGGGGAGCGATAGTGAGTGGG | |
| | | cattttggcagggctgtgccgcgggcttaagtaccctgggtattgaagcggatg | |
| | | GTGCTATAAAAGGTTGTCCCTCACTGCCAACGAGCGCGTATACCGGCGGTAACA | |
| | | TTCGCGAACATAGTCTGCGAGAAATAGTGGAAGAATCGGAACAGCTGCGTTTTA | |
| | | ACCTCGGTGCAGGGACGAGCCAAGGGACCGCCCACTTGTGGGGCTTTTGCCAGA | |
| | | CGTGTGAATTTAGTGAATTGTGCAGAGGTGGTTGTACGTGGACAGCTCACGTGT | |
| | | TCTTTAACCGCCGTGGGAATAACCCGTATTGTCATCATCGGGCGCTTTTCCAAG | |
| | | CGGAGCAGGGTATCAGAGAACGTGTCGTGCCAAAGGTCGAAGCTCAGGGCCTGC | |
| | | CGTTTGACAACGGTGAATTTGAACTTATCGAAGAACCTATTGACGCGCCTCTGC | |
| | | CCGAAAATGATCCACTGCACTTTACCAGCGACTTAGTGCAGTGGTCAGCGAGTT | |
| | | [chemical structure] | |
| | | [chemical structure] | |
| | | TGAACCGGAAAGCCTGCTTCTGCCGCGCCAGGCTTGGCAGTCGCAGATCGCCTA | |
| | | TCTTAAAGCGATTCTGAAAGCCAAACAGGCGCTTGACCGGATCGAAAAACGTTA | |
| | | TCTGCGGTAATAA | |
| pEG7160 | LynD | [chemical structure] | 710 |
| | | ACATTTCCATGTAGAGGTCATTGAACCAAAGCAAGTCTACTTGTTGGGTGAACA | |
| | | AGCTAATCATGCATTGACAGGCCAATTATACTGCCAAATTTTGCCATTGTTAAA | |
| | | CGGACAATACACATTGGAACAAATCGTTGAAAAACTAGACGGAGAAGTACCACC | |
| | | TGAATACATTGATTATGTGCTGGAGAGACTAGCTGAGAAGGGCTATCTGACTGA | |
| | | AGCAGCACCTGAATTATCTAGTGAAGTGGCCGCTTTCTGGTCTGAGCTGGGGAT | |
| | | TGCACCTCCTGTCGCGGCCGAAGCATTACGTCAACCTGTGACTTTAACACCTGT | |
| | | TGGAAACATCAGCGAAGTAACAGTAGCAGCCTTAACCACAGCCCTACGTGATAT | |
| | | CGGTATTTCCGTTCAAACACCTACAGAAGCTGGATCGCCAACTGCATTGAACGT | |
| | | TGTACTTACCGATGATTATCTCCAACCAGAACTCGCTAAGATCAATAAGCAAGC | |
| | | CTTAGAAAGTCAACAAACTTGGCTACTTGTCAAACCAGTTGGCTCCGTGTTATG | |
| | | GTTGGGTCCGGTATTCGTGCCAGGAAAAACAGGTTGCTGGGATTGTTTGGCTCA | |
| | | CAGATTAAGGGGGAATAGAGAGGTAGAGGCCTCTGTATTGAGACAAAAACAAGC | |
| | | TCAACAACAACGTAATGGACAAAGCGGGTCTGTAATAGGATGCCTTCCCACGGC | |
| | | TAGAGCGACACTGCCCTCAACACTCCAAACTGGGCTGCAGTTCGCTGCTACCGA | |
| | | AATTGCTAAATGGATAGTTAAGTATCATGTTAATGCCACAGCGCCTGGCACCGT | |
| | | ATTCTTCCCTACATTGGATGGTAAGATAATTACGCTAAATCACTCCATACTGGA | |
| | | TTTGAAGTCACATATTCTGATCAAGCGTTCTCAATGTCCCACCTGTGGTGACCC | |
| | | AAAAATCTTACAGCACCGTGGTTTCGAACCTTTAAAACTTGAGTCAAGGCCTAA | |
| | | ACAGTTCACCTCAGACGGCGGACATCGTGGTACTACCCCTGAACAAACTGTCCA | |
| | | GAAATATCAACATTTAATCTCGCCTGTTACCGGTGTAGTTACTGAATTGGTCAG | |
| | | GATAACTGATCCGGCCAATCCACTAGTTCACACATATAGAGCTGGTCATAGCTT | |
| | | CGGGAGCGCTACATCGCTGAGAGGGCTGCGTAATACCTTAAAGCATAAGAGTTC | |
| | | AGGTAAGGGTAAGACTGATTCTCAAAGTAAAGCCTCGGGCCTGTGTGAGGCGGT | |
| | | AGAACGTTACTCAGGAATCTTTCAAGGTGACGAACCGAGAAAACGCGCCACATT | |
| | | GGCTGAATTGGGAGATTTGGCAATTCACCCTGAGCAATGCTTGTGTTTTTCCGA | |
| | | CGGTCAGTACGCTAATAGAGAAACTTTAAACGAACAGGCAACGGTGGCACATGA | |
| | | TTGGATACCTCAACGTTTTGATGCATCACAAGCTATTGAATGGACTCCAGTCTG | |
| | | GTCCCTAACTGAACAGACCCATAAATATTTGCCCACCGCATTGTGTTACTACCA | |
| | | TTATCCTCTACCCCCAGAACACAGATTCGCACGTGGAGATTCGAATGGTAATGC | |
| | | TGCCGGAAATACGTTGGAAGAGGCTATACTCCAAGGCTTCATGGAATTAGTCGA | |
| | | GAGAGATGGTGTGGCTTTATGGTGGTATAACAGGCTACGCAGACCCGCTGTAGA | |
| | | CTTAGGCTCATTTAACGAGCCATACTTCGTTCAGTTGCAACAATTCTACAGAGA | |
| | | AAACGATAGAGATTTGTGGGTTTTGGACTTGACAGCTGATTTAGGTATCCCGGC | |
| | | TTTCGCGGGCGTTTCTAATAGAAAAACTGGTAGTTCGGAGAGGTTGATATTAGG | |
| | | ATTCGGTGCACACCTCGATCCTACTATTGCAATTCTGAGAGCAGTTACAGAAGT | |
| | | TAACCAGATTGGCCTTGAATTAGATAAAGTTCCAGACGAGAACCTTAAGAGCGA | |
| | | CGCAACAGATTGGCTAATTACTGAAAAATTAGCTGACCACCCTTATTTGTTACC | |
| | | AGATACAACTCAACCTCTAAAAACTGCTCAAGATTATCCTAAAAGGTGGTCTGA | |
| | | CGATATATACACGGACGTAATGACTTGCGTTAATATTGCTCAACAAGCAGGACT | |
| | | TGAAACTCTAGTTATTGATCAAACACGTCCGGACATTGGTTTGAATGTTGTTAA | |
| | | GGTGACAGTCCCGGGGATGAGGCACTTTTGGTCAAGATTTGGAGAGGGGAGGCT | |
| | | TTATGACGTGCCCGTCAAATTAGGTTGGCTTGACGAACCTTTGACCGAAGCGCA | |
| | | AATGAACCCCACGCCGATGCCTTTTTAATAA | |
| pEG7166 | PapoK | [chemical structure] | 711 |
| | | ACCAAATACATCGCGTTTGGTCTGCGCATTGCCAGCGAACTCAACTTACCGGAA | |
| | | CTGATATTGGCGGCTCCCGAAGCCGTTGAGGATGTTGTCATACGCCAGGCAGAT | |
| | | CTCACGGCCTGGTCTGGCCAACTTGAACAGGCAAATTTTGTCATGTTGGACGAA | |
| | | CGTTTCATGTTTCAGATCCCGGGGACCGCCATTTATGCGGTACGCGAAGGCAAA | |
| | | GAGATTGAAGTGAGCATCTTCTCTGGGGCCGACCCGGACACCGTGCGCCTTTTC | |
| | | GTGCTGGGGACGTGCATGGGCGTGCTCTTGATGCAGCGCCGCATTCTGCCTATC | |
| | | CACGGCTCCGCCGTCGTTATCGGTGGCCGCGCGTATGCCTTTGTTGGTGAATCA | |
| | | GGCACAGGTAAATCGACCTTAGCTGCAGCATTTCGGCAGGCCGGTTACCAAATG | |
| | | GTTAGCGATGATGTCATTGCCGTCAAAGCGACCGCATCTAGCGCTATTGTTTAC | |
| | | CCTGCGTATCCACAGCAAAAACTGGGTTTAGATTCGCTGTTGCAGCTTGAAGCG | |
| | | CTCCGTGAGAATAAGCACGCCCGCAAGCGTAACAACATCCGTTCTCTGACGGAT | |
| | | GGCAATAGTGTGATGCCGCAGTACAGCGATCTGCGCATGCTGGCGGGGGAACTG | |
| | | AATAAATATGCAGTTCCAGCCGTCGATGAATTCTTTAATGACCCGCTGCCGTTG | |
| | | GGCGGTGTTTTCGAACTGGTAGCAGACAGTCCGATTCGAGCATTAATGCGCGAA | |
| | | GGCGAACTCGTCGCTGTGACCGAGCAACCGCTGAACGTTCTGGAATGTTTACAT | |
| | | ACTCTTCTGCAACACACGTACCGTCGGGTAATCATCCCTCGAATGGGACTGAGC | |
| | | GAGTGGAGCTTCGATACTGCGGCCCGAATGGCACGCAAGGTCGAGGGCTGGCGA | |
| | | CTCCTCCGTGATAGCTCCGTGTTCACGGCTAGTGAAGTCGTCCAGCGCGTCCTC | |
| | | GACATCATCCGTAAGGAGGAAAAGAGCTACGGATCACACTAATAA | |
| pEG7169 | EpiD | [chemical structure] | 712 |
| | | GCTTCGATCAACGTCATCAATATCAACCATTATATTGTGGAGCTGAAACAGCAC | |
| | | TTCGATGAGGTGAATATCCTGTTTTCACCTTCCTCGAAGAACTTTATCAACACC | |
| | | GATGTCCTGAAGCTGTTTTGCGATAATCTGTATGACGAGATCAAAGATCCGCTG | |
| | | CTGAACCACATCAACATAGTGGAGAACCACGAGTATATCTTGGTGCTGCCTGCC | |
| | | AGTGCCAATACGATCAACAAAATCGCGAACGGTATATGCGATAACCTCTTGACG | |
| | | ACCGTATGCTTAACCGGGTACCAGAAACTGTTTATCTTTCCGAATATGAACATC | |
| | | CGCATGTGGGGAAATCCGTTCTTACAGAAAAATATTGACCTGCTTAAAAGCAAC | |
| | | GACGTGAAGGTGTATTCCCCCGACATGAACAAATCTTTTGAGATAAGCTCAGGC | |
| | | CGCTACAAAAATAACATCACGATGCCGAATATCGAAAACGTGCTGAATTTTGTC | |
| | | CTGAACAATGAGAAACGCCCGCTGGATTAATAA | |
| pEG7171 | BamB | [chemical structure] | 713 |
| | | AAGTGCATAGTCGTATACACAAACTGCAAAATAATATCGCAATAGGTAGCATGC | |
| | | CGCCTCACGCGCTGATCATCGAGGATGCCCCCGAATATTTGTCAAACGTTCTGC | |
| | | GCTTCTTTAGTAGCAAAAAGACTATAAAAGAAGCTGAAGTGTACCTGTCGGATA | |
| | | ATACGAATCTGAGCTCCAATGAGATCAACCTGTTGTTAGGTGATCTGATTGAGA | |
| | | ACGAGATTATCGTAAAGCAAAACTACGACTCGAATAATCGGTACAGTCGACACA | |
| | | GTCTGTATTACGAGATGATTGATGCCAACGCTGAAAACGCGCAGAAAATTCTGG | |
| | | CAGAGAAAACAGTGGGCCTCGTTGGGATGGGCGGGATTGGTTCCAATGTAGCCA | |
| | | TGAATCTCGCAGCCGCCGGTGTTGGCAAACTGATCTTTAGTGATGGCGATACCA | |
| | | TAGAACTGTCTAATTTAACGCGACAGTATCTTTACAAAGAGGATCAGGTGGGCT | |
| | | TGAGCAAAGTAGAGAGCGCCAAAGAACAACTGCAATTACTGAATAGCGAAGTCG | |
| | | AGCTTATCCCGGTTTGCGAAAGTATCTCTGGTGAGGAACTGTTCGACAACCATT | |
| | | TCTCCGAATGCGATTTCGTCGTACTGTCCGCCGACTCTCCGTTCTTTGTTCACG | |
| | | AATGGATTAACAATGCCGCGTTGAAATATGGCTTCTCCTACTCTAACGCAGGAT | |
| | | ATATCGAAACCTATGGCGCGATCGGTCCACTGGTGATACCTGGGGAAACTGCCT | |
| | | GCTACGAATGCTATAAAGACAAGGGCGATCTTTACTTGTACTCCGACAACAAGG | |
| | | AAGAATTTTCTGTGAACCTGAATGAATCATTCCAAGCACCGAGCTATGGACCGC | |
| | | TTAATGCGATGGTTAGTTCCATTCAGGCGAATGAAGTGATACGCCACCTCCTCG | |
| | | GACTTAAAACCAAAACGTCCGGCAAACGGCTGCTGATCAACAGTGAAATCTACA | |
| | | AAATCCACGAAGAGAACTTCGAGAAGAAGAACAACTGCCTGTGCTCGGATATTA | |
| | | AGGGCGAGAAGCTGTCGAAGAACACCCTTAACTCCGATAAAGAGCTGCACGAAG | |
| | | TGTATATCGAAGAACGCGAATCGGATTCTTTCAACTCCATTCTCTTGGATAAAA | |
| | | CCATGAGCAAGCTGGTAAAAATTAACAAAGAGGAGACAAAAATCCTCGACATTG | |
| | | GTTGCGCTACCGGCGAACAGGCTCTGTATTTCGCGAATAAAGGTGCTAAGGTGA | |
| | | CCGCTGTCGACATTTCAGACGATATGTTGAAGGTGCTGGACAAGAAAGCAAGCA | |
| | | ACATTAACGCGGGGAGTATCAAAACCATGCGTGGTAATATCGAATCCATCGAGG | |
| | | TGAATGACACTTTTAATTACATCGTCTGTAACAACATCCTTGATTACCTGCCGG | |
| | | AGATCGACCGCACGCTGAGAAAACTTAACATGTTTTTGAAAAATGACGGGACGC | |
| | | TGATTGTGACGATTCCCCACCCCGTGAAGGATGGTGGAGGGTGGCGGAAAGATT | |
| | | ATTATAACGGCAAATGGAACTACGAAGAGTTTATCCTGAAGGATTACTTCAACG | |
| | | AGGGTCTGATCGAAAAGAGCCGCGAGGACAAAAATGGGGAAACGGTGATCAAAA | |
| | | GCATTAAAACGTACCACAGAACCACCGAAACCTATTTCAATAGCTTTACTGACG | |
| | | CTGGCTTCAAGGTAGTATCTCTGCTGGAACCGCAACCGCTTTCAACTGTTTCAG | |
| | | AGACTCATCCAATTCTGTTCGAAAAGTGTTCGCGCATTCCGTACTTTCAAGTTT | |
| | | TTGTGCTCAAGAAAGAGGATCGCCACGCCATTTAATAA | |

^{a}In each backbone sequence (labeled “bEG_SX”, where X is a number), the relevant part (encoding a peptide or RBS + enzyme) has GFP as a placeholder (RBS + GFP for enzyme plasmid) and is double underlined. This region can be replaced with an insert DNA (such as a peptide or RBS + enzyme, including those listed below each plasmid backbone sequence) to get a plasmid sequence. The full plasmid sequences used herein (labeled “pEG####”) for peptides and enzymes can be identified by replacing the double underlined portion of the backbone sequence found above a given peptide/RBS + enzyme sequence with the respective peptide/RBS + enzyme sequence (for example, the full pEG3045 plasmid sequence is provided by replacing the double underlined portion of the bEG_S2 backbone sequence with the HIS₆-MdnA provided next to the pEG3045 label).
^{b}Text is formatted according to sequence components: promoters (lowercase), ribozyme [chemical structure]
(UNDERLINED), and plasmid backbone and spacers (REGULAR ALL CAPS).

### OTHER EMBODIMENTS

[0783] All of the features disclosed in this specification may be combined in any combination. Each feature disclosed in this specification may be replaced by an alternative feature serving the same, equivalent, or similar purpose. Thus, unless expressly stated otherwise, each feature disclosed is only an example of a generic series of equivalent or similar features.

[0784] From the above description, one skilled in the art can easily ascertain the essential characteristics of the present invention, and without departing from the spirit and scope thereof, can make various changes and modifications of the invention to adapt it to various usages and conditions. Thus, other embodiments are also within the claims.

### EQUIVALENTS

[0785] While several inventive embodiments have been described and illustrated herein, those of ordinary skill in the art will readily envision a variety of other means and/or structures for performing the function and/or obtaining the results and/or one or more of the advantages described herein, and each of such variations and/or modifications is deemed to be within the scope of the inventive embodiments described herein. More generally, those skilled in the art will readily appreciate that all parameters, dimensions, materials, and configurations described herein are meant to be exemplary and that the actual parameters, dimensions, materials, and/or configurations will depend upon the specific application or applications for which the inventive teachings is/are used. Those skilled in the art will recognize, or be able to ascertain using no more than routine experimentation, many equivalents to the specific inventive embodiments described herein. It is, therefore, to be understood that the foregoing embodiments are presented by way of example only and that, within the scope of the appended claims and equivalents thereto, inventive embodiments may be practiced otherwise than as specifically described and claimed. Inventive embodiments of the present disclosure are directed to each individual feature, system, article, material, kit, and/or method described herein. In addition, any combination of two or more such features, systems, articles, materials, kits, and/or methods, if such features, systems, articles, materials, kits, and/or methods are not mutually inconsistent, is included within the inventive scope of the present disclosure.

[0786] All definitions, as defined and used herein, should be understood to control over dictionary definitions, definitions in documents incorporated by reference, and/or ordinary meanings of the defined terms.

[0787] All references, patents and patent applications disclosed herein are incorporated by reference with respect to the subject matter for which each is cited, which in some cases may encompass the entirety of the document.

[0788] The indefinite articles “a” and “an,” as used herein in the specification and in the claims, unless clearly indicated to the contrary, should be understood to mean “at least one.”

[0789] The phrase “and/or,” as used herein in the specification and in the claims, should be understood to mean “either or both” of the elements so conjoined, i.e., elements that are conjunctively present in some cases and disjunctively present in other cases. Multiple elements listed with “and/or” should be construed in the same fashion, i.e., “one or more” of the elements so conjoined. Other elements may optionally be present other than the elements specifically identified by the “and/or” clause, whether related or unrelated to those elements specifically identified. Thus, as a non-limiting example, a reference to “A and/or B”, when used in conjunction with open-ended language such as “comprising” can refer, in one embodiment, to A only (optionally including elements other than B); in another embodiment, to B only (optionally including elements other than A); in yet another embodiment, to both A and B (optionally including other elements); etc.

[0790] As used herein in the specification and in the claims, “or” should be understood to have the same meaning as “and/or” as defined above. For example, when separating items in a list, “or” or “and/or” shall be interpreted as being inclusive, i.e., the inclusion of at least one, but also including more than one, of a number or list of elements, and, optionally, additional unlisted items. Only terms clearly indicated to the contrary, such as “only one of” or “exactly one of,” or, when used in the claims, “consisting of,” will refer to the inclusion of exactly one element of a number or list of elements. In general, the term “or” as used herein shall only be interpreted as indicating exclusive alternatives (i.e. “one or the other but not both”) when preceded by terms of exclusivity, such as “either,” “one of,” “only one of,” or “exactly one of.” “Consisting essentially of,” when used in the claims, shall have its ordinary meaning as used in the field of patent law.

[0791] As used herein in the specification and in the claims, the phrase “at least one,” in reference to a list of one or more elements, should be understood to mean at least one element selected from any one or more of the elements in the list of elements, but not necessarily including at least one of each and every element specifically listed within the list of elements and not excluding any combinations of elements in the list of elements. This definition also allows that elements may optionally be present other than the elements specifically identified within the list of elements to which the phrase “at least one” refers, whether related or unrelated to those elements specifically identified. Thus, as a non-limiting example, “at least one of A and B” (or, equivalently, “at least one of A or B,” or, equivalently “at least one of A and/or B”) can refer, in one embodiment, to at least one, optionally including more than one, A, with no B present (and optionally including elements other than B); in another embodiment, to at least one, optionally including more than one, B, with no A present (and optionally including elements other than A); in yet another embodiment, to at least one, optionally including more than one, A, and at least one, optionally including more than one, B (and optionally including other elements); etc.

[0792] It should also be understood that, unless clearly indicated to the contrary, in any methods claimed herein that include more than one step or act, the order of the steps or acts of the method is not necessarily limited to the order in which the steps or acts of the method are recited.

What is claimed is:

1. A non-naturally occurring peptide comprising:
(A) AACX₁X₂X₃X₄X₅X₆MPPX₇X₈X₉X₁₀X₁₁X₁₂C (SEQ ID NO: 1) (scaffold L1), wherein:
(i) X₆ and X₇ are each the amino acid S or T;
(ii) X₁-X₅ and X₈-X₁₂ are each any amino acid; and
(iii) the peptide comprises a thioether bridge that links C at position 3 in to S or T at position 9 in SEQ ID NO: 1 and a thioether bridge that links S or T at position 13 to C at position 19 in SEQ ID NO: 1;
(B) X₁PX₂TTX₃X₄TX₅X₆X₇EX₈X₉DX₁₀DEX₁₁X₁₂X₁₃ (SEQ ID NO: 2) (scaffold L2), wherein:
(i) X₂ is the amino acid H, Q, N, K, D, or E;
(ii) X₆ is the amino acid F, L, S, I, M, T, V, or A;
(iii) X₇ is the amino acid F, L, I, or V;
(iv) X₁, X₃-X₅ and X₈-X₁₃ are each any amino acid; and
(v) the peptide comprises an ester bridge that links T at position 5 of SEQ ID NO: 2 to D at position 15 of SEQ ID NO: 2 and an ester bridge that links T at position 8 of SEQ ID NO: 2 to E at position 12 of SEQ ID NO: 2;
(C) X₁CX₂X₃X₄X₅X₆CX₇X₈X₉X₁₀X₁₁ (SEQ ID NO: 3) (scaffold L3), wherein:
(i) X₅ and X₁₀ are each the amino acid D or E;
(ii) X₁-X₄, X₆-X₉, and X₁₁ are each any amino acid; and
(iii) the peptide comprises a thioether bridge that links C at position 2 to D or E at position 6 of SEQ ID NO: 3 and a thioether bridge that links C at position 8 to D or E at position 12 of SEQ ID NO: 3;
(D) X₁CX₂X₃CX₄X₅X₆X₇X₈X₉ (SEQ ID NO: 4) (scaffold L4), wherein:
(i) X₄ and X₇ are each the amino acid D or E;
(ii) X₁-X₃, X₅-X₆, and X₈-X₉ are each any amino acid; and
(iii) the peptide comprises a thioether bridge that links C at position 2 to D or E at position 6 of SEQ ID NO: 4 and a thioether bridge that links C at position 5 to D or E at position 9 of SEQ ID NO: 4; and/or
(E) X₁CX₂X₃X₄X₅X₆CX₇X₈CX₉X₁₀X₁₁X₁₂X₁₃ (SEQ ID NO: 5), wherein:
(i) X₅, X₉, and X₁₂ are each the amino acid D or E;
(ii) X₁-X₄, X₆-X₈, X₁₀-X₁₁, and X₁₃ are each any amino acid; and
(iii) the peptide comprises a thioether bridge that links the C at position 2 to D or E at position 6 of SEQ ID NO: 5, a thioether bridge that links C at position 8 of SEQ ID NO: 5 with D or E at position 12 of SEQ ID NO: 5, and a thioether bridge that links C at position 11 with D or E at position 15 of SEQ ID NO: 5.

2. The non-naturally occurring peptide of claim 1, comprising scaffold L5 and a sequence selected from SEQ ID NOS: 6-16; and/or scaffold L3 and a sequence selected from SEQ ID NOs: 17-25.

3. The non-naturally occurring peptide of claim 1 or 2, wherein the non-naturally occurring peptide comprises scaffold L3 and SEQ ID NO: 24.

4. A host cell comprising a heterologous nucleic acid encoding the non-naturally occurring peptide of any one of claims 1-3.

5. The host cell of claim 4, wherein the heterologous nucleic acid further encodes SEQ ID NO: 46.

6. The host cell of claim 4 or 5, wherein the heterologous nucleic acid comprises any one of SEQ ID NOs: 47-66.

7. A host cell comprising:
(a) a first fusion protein comprising (i) a first fragment of a transcription factor, (ii) a first split intein, and (iii) a target protein;
(b) a second fusion protein comprising (i) a candidate peptide, (ii) a second split intein, and (iii) a second fragment of the transcription factor; wherein the first split intein and second split intein are complementary fragments; and
(c) an inducible promoter operably linked to at least one reporter gene, wherein the transcription factor induces transcription of the at least one reporter gene when the transcription factor is present as a full-length transcription factor.

8. The host cell of claim 7, wherein:
(A) in (a), the first fusion protein comprises (i)-(iii) linked sequentially from the N-terminus to the C-terminus, the first fragment is an N-terminal fragment of the transcription factor and the first split intein is an N-terminal split intein; and
(B) in (b), (i)-(iii) are linked sequentially from the N-terminus to the C-terminus, wherein the second split intein is a C-terminal split intein, and the second fragment is a C-terminal fragment of the transcription factor; or
(C) in (a), from the N-terminus to the C-terminus, the first fusion protein comprises (iii) linked to (ii) linked to (i), wherein the first fragment is a C-terminal fragment of the transcription factor and the first split intein is a C-terminal split intein; and
(D) in (b), from the N-terminus to the C-terminus, the second fusion protein comprises (iii) linked to (ii) linked to (i), wherein the second split intein is an N-terminal split intein and the second fragment is an N-terminal fragment of the transcription factor.

9. The host cell of claim 7 or 8, wherein the cell is a eukaryotic or prokaryotic cell, optionally wherein the prokaryotic cell is a bacterial cell.

10. The host cell of any one of claims 7-9, wherein the transcription factor is a sigma factor (a factor).

11. The host cell of any one of claims 7-10, wherein the first fusion protein is encoded by a first heterologous nucleic acid and the second fusion is encoded by a second heterologous nucleic acid.

12. The host cell of any one of claims 7-11, wherein the candidate peptide comprises a sequence selected from SEQ ID NOs: 6-25 or comprises the non-naturally occurring peptide of any one of claims 1 or 2, optionally wherein the candidate peptide further comprises SEQ ID NO: 46.

13. The host cell of any one of claims 7-12, wherein the at least one reporter gene encodes a positive selection marker, a negative selection marker, and/or a fluorescent protein, optionally wherein the positive selection marker is an antibiotic resistance gene, optionally wherein the antibiotic resistance gene is chloramphenicol acetyltransferase (cat), optionally wherein the negative selection marker is the herpes simplex virus-thymidine kinase (hsvtk) gene.

14. The host cell of any one of claims 7-13, wherein the inducible promoter is an ECF promoter.

15. The host cell of any one of claims 7-14, wherein the target protein comprises a viral receptor binding domain (RBD) of the SARS-CoV-2 spike protein.

16. The host cell of claim 15, wherein the RBD comprises SEQ ID NO: 71.

17. The host cell of any one of claims 4-16, further comprising one or more enzymes selected from ProcM, LynD, TgnB, or PapB, optionally wherein the host cell comprises a heterologous nucleic acid encoding the enzyme, optionally wherein the heterologous nucleic acid encoding the enzyme comprises an inducible promoter.

18. A method of identifying a peptide that binds a target protein comprising culturing the host cell of any one of claims 7-17 and detecting transcription of the at least one reporter gene, thereby identifying the candidate peptide as being capable of binding to the target protein.

19. A method of identifying a peptide that binds a target protein comprising incubating in a reaction vessel:
(a) a first fusion protein comprising (i) a first fragment of a transcription factor, (ii) a first split intein, and (iii) a target protein;
(b) a second fusion protein comprising (i) a candidate peptide, (ii) a second split intein, and (iii) a second fragment of the transcription factor; wherein the first and second split inteins belong to the same intein; and
(c) an inducible promoter operably linked to at least one reporter gene, wherein the transcription factor induces transcription of the at least one reporter gene when the transcription factor is present as a full-length transcription factor, and detecting transcription of the reporter gene, thereby identifying the candidate peptide as being capable of binding to the target protein.

20. A method of treating a subject having or suspected of having a SARS-CoV-2 infection comprising administering an effective amount of the non-naturally occurring peptide of any one of claims 1-3.

21. The method of claim 18 or 19, wherein the method comprises: repeating the method with a plurality of candidate peptides.

22. The method of claim 18, or 21, wherein culturing comprises positive and/or negative selection of the host cell.

23. The method of claim 21 or 22, wherein the method further comprises sequencing.

24. A library comprising a plurality of peptides, wherein each peptide of the plurality of peptides has a length of n amino acids and has an amino acid sequence defined by a motif X₁X₂X₃X₄ . . . Xₙ, wherein n is 5-100, wherein each of X₁-Xₙ is independently selected from a group consisting of up to 20 amino acids and at least one of X₁-Xₙ within each peptide is an amino acid selected from a group consisting of 19 or fewer amino acids, and wherein the motif X₁X₂X₃X₄ . . . Xₙ is determined to be susceptible to post-translational modification by at least 2 distinct protein modification enzymes.

25. The library of claim 24, wherein less than 80% of the plurality of peptides are capable of being fully modified by the at least 2 distinct protein modification enzymes.

26. The library of claim 24 or 25, wherein at least one of X₁-Xₙ is defined to be a single amino acid.

27. A composition comprising a plurality of host cells, each host cell of the plurality comprising a peptide of the library of any one of claims 24-26, wherein the peptide comprised by each host cell is independent of the peptide comprised by each other host cell.

28. The composition of claim 27, wherein the composition comprises each peptide of the plurality of peptides.

29. The composition of claim 27 or claim 28, wherein the host cells are bacterial cells.

30. The composition of any one of claims 27-29, wherein the peptide is encoded by a first nucleic acid sequence in the host cell.

31. The composition of any one of claims 27-30, wherein each host cell further comprises at least one protein modifying enzyme.

32. The composition of claim 31, wherein the at least one protein modifying enzyme is encoded by a second nucleic acid sequence in the host cell.

32. A method of designing an amino acid motif, the method comprising:
(i) selecting one or more protein modifying enzymes;
(ii) identifying a recognition site (RS) sequence for each of the one or more protein modifying enzymes;
(iii) constructing a plurality of nucleic acid molecules, each nucleic acid molecule encoding a leader amino acid sequence comprising the RS sequence for each of the one or more protein modifying enzymes;
(iv) assigning a score to each of the plurality of nucleic acid molecules; and
(v) selecting one of the plurality of nucleic acid molecules based on step (iv),
to design the amino acid motif, wherein each RS sequence facilitates interaction of the corresponding protein modifying enzyme to a peptide defined by the amino acid motif, and wherein the leader amino acid sequence encoded by the nucleic acid molecule selected in step (v) is comprised within each peptide defined by the amino acid motif.

33. The method of claim 32, wherein each peptide defined by the amino acid motif further comprises a core sequence.

34. The method of claim 33, wherein the core sequence comprises one or more amino acids susceptible to modification by the one or more protein modifying enzymes.

The application's sequence listing, which the Patent Office published only in electronic form, follows.

SEQUENCE LISTING (939 sequences)

SEQ ID NO: 1 - protein, 19 aa, Artificial Sequence
  Synthetic
  misc_feature (4)..(8): Xaa can be any naturally occurring amino acid
  MOD_RES (9)..(9): Xaa may be S or T
  MOD_RES (13)..(13): Xaa may be S or T
  misc_feature (14)..(18): Xaa can be any naturally occurring amino acid
AACXXXXXXMPPXXXXXXC

SEQ ID NO: 2 - protein, 21 aa, Artificial Sequence
  Synthetic
  misc_feature (1)..(1): Xaa can be any naturally occurring amino acid
  MOD_RES (3)..(3): Xaa may be H, Q, N, K, D, or E
  misc_feature (6)..(7): Xaa can be any naturally occurring amino acid
  misc_feature (9)..(9): Xaa can be any naturally occurring amino acid
  MOD_RES (10)..(10): Xaa may be F, L, S, I, M, T, V, or A
  MOD_RES (11)..(11): Xaa may be F, L, I, or V
  misc_feature (13)..(14): Xaa can be any naturally occurring amino acid
  misc_feature (16)..(16): Xaa can be any naturally occurring amino acid
  misc_feature (19)..(21): Xaa can be any naturally occurring amino acid
XPXTTXXTXXXEXXDXDEXXX

SEQ ID NO: 3 - protein, 13 aa, Artificial Sequence
  Synthetic
  misc_feature (1)..(1): Xaa can be any naturally occurring amino acid
  misc_feature (3)..(5): Xaa can be any naturally occurring amino acid
  MOD_RES (6)..(6): Xaa may be D or E
  misc_feature (7)..(7): Xaa can be any naturally occurring amino acid
  misc_feature (9)..(11): Xaa can be any naturally occurring amino acid
  MOD_RES (12)..(12): Xaa may be D or E
  misc_feature (13)..(13): Xaa can be any naturally occurring amino acid
XCXXXXXCXXXXX

SEQ ID NO: 4 - protein, 11 aa, Artificial Sequence
  Synthetic
  misc_feature (1)..(1): Xaa can be any naturally occurring amino acid
  misc_feature (3)..(4): Xaa can be any naturally occurring amino acid
  MOD_RES (6)..(6): Xaa may be D or E
  misc_feature (7)..(8): Xaa can be any naturally occurring amino acid
  MOD_RES (9)..(9): Xaa may be D or E
  misc_feature (10)..(11): Xaa can be any naturally occurring amino acid
XCXXCXXXXXX

SEQ ID NO: 5 - protein, 16 aa, Artificial Sequence
  Synthetic
  misc_feature (1)..(1): Xaa can be any naturally occurring amino acid
  misc_feature (3)..(5): Xaa can be any naturally occurring amino acid
  MOD_RES (6)..(6): Xaa may be D or E
  misc_feature (7)..(7): Xaa can be any naturally occurring amino acid
  misc_feature (9)..(10): Xaa can be any naturally occurring amino acid
  MOD_RES (12)..(12): Xaa may be D or E
  misc_feature (13)..(14): Xaa can be any naturally occurring amino acid
  MOD_RES (15)..(15): Xaa may be D or E
  misc_feature (16)..(16): Xaa can be any naturally occurring amino acid
XCXXXXXCXXCXXXXX

SEQ ID NO: 6 - protein, 16 aa, Artificial Sequence
  Synthetic
ACTACEQCSKCDTNEK

SEQ ID NO: 7 - protein, 16 aa, Artificial Sequence
  Synthetic
ECPADETCMHCESHEM

SEQ ID NO: 8 - protein, 16 aa, Artificial Sequence
  Synthetic
HCIFIESCDVCELNEP

SEQ ID NO: 9 - protein, 16 aa, Artificial Sequence
  Synthetic
KCEKREECADCDHLEF

SEQ ID NO: 10 - protein, 16 aa, Artificial Sequence
  Synthetic
KCTSKECCIQCEGSES

SEQ ID NO: 11 - protein, 16 aa, Artificial Sequence
  Synthetic
MCVFCEICVMCDTHEM

SEQ ID NO: 12 - protein, 16 aa, Artificial Sequence
  Synthetic
PCGKREPCNTCEHFET

SEQ ID NO: 13 - protein, 16 aa, Artificial Sequence
  Synthetic
PCTTTEACTACDSSDA

SEQ ID NO: 14 - protein, 16 aa, Artificial Sequence
  Synthetic
RCRCPENCLSCEPPER

SEQ ID NO: 15 - protein, 16 aa, Artificial Sequence
  Synthetic
SCTPDEVCPLCEPCEP

SEQ ID NO: 16 - protein, 16 aa, Artificial Sequence
  Synthetic
TCTMAEKCQICDVSEG

SEQ ID NO: 17 - protein, 13 aa, Artificial Sequence
  Synthetic
ACTNPDPCTDEEI

SEQ ID NO: 18 - protein, 13 aa, Artificial Sequence
  Synthetic
PCEVLDNCTNPDH

SEQ ID NO: 19 - protein, 13 aa, Artificial Sequence
  Synthetic
ACTNPDPCTDEEI

SEQ ID NO: 20 - protein, 13 aa, Artificial Sequence
  Synthetic
KCDEGDHCGTKDL

SEQ ID NO: 21 - protein, 13 aa, Artificial Sequence
  Synthetic
PCEVLDNCTKPDH

SEQ ID NO: 22 - protein, 13 aa, Artificial Sequence
  Synthetic
PCEVLDNCTNPDH

SEQ ID NO: 23 - protein, 13 aa, Artificial Sequence
  Synthetic
QCPWHERCDQCEP

SEQ ID NO: 24 - protein, 13 aa, Artificial Sequence
  Synthetic
VCKYGEWCEIVEI

SEQ ID NO: 25 - protein, 13 aa, Artificial Sequence
  Synthetic
YCNITERCHSDEH

SEQ ID NO: 26 - protein, 34 aa, Artificial Sequence
  Synthetic
MLKQINVIAGVKEPIRAYACTACEQCSKCDTNEK

SEQ ID NO: 27 - protein, 34 aa, Artificial Sequence
  Synthetic
MLKQINVIAGVKEPIRAYECPADETCMHCESHEM

SEQ ID NO: 28 - protein, 34 aa, Artificial Sequence
  Synthetic
MLKQINVIAGVKEPIRAYHCIFIESCDVCELNEP

SEQ ID NO: 29 - protein, 34 aa, Artificial Sequence
  Synthetic
MLKQINVIAGVKEPIRAYKCEKREECADCDHLEF

SEQ ID NO: 30 - protein, 34 aa, Artificial Sequence
  Synthetic
MLKQINVIAGVKEPIRAYKCTSKECCIQCEGSES

SEQ ID NO: 31 - protein, 34 aa, Artificial Sequence
  Synthetic
MLKQINVIAGVKEPIRAYMCVFCEICVMCDTHEM

SEQ ID NO: 32 - protein, 34 aa, Artificial Sequence
  Synthetic
MLKQINVIAGVKEPIRAYPCGKREPCNTCEHFET

SEQ ID NO: 33 - protein, 34 aa, Artificial Sequence
  Synthetic
MLKQINVIAGVKEPIRAYPCTTTEACTACDSSDA

SEQ ID NO: 34 - protein, 34 aa, Artificial Sequence
  Synthetic
MLKQINVIAGVKEPIRAYRCRCPENCLSCEPPER

SEQ ID NO: 35 - protein, 34 aa, Artificial Sequence
  Synthetic
MLKQINVIAGVKEPIRAYSCTPDEVCPLCEPCEP

SEQ ID NO: 36 - protein, 34 aa, Artificial Sequence
  Synthetic
MLKQINVIAGVKEPIRAYTCTMAEKCQICDVSEG

SEQ ID NO: 37 - protein, 31 aa, Artificial Sequence
  Synthetic
MLKQINVIAGVKAPIRAYACTNPDPCTDEEI

SEQ ID NO: 38 - protein, 31 aa, Artificial Sequence
  Synthetic
MLKQINVIAGVKAPIRAYPCEVLDNCTNPDH

SEQ ID NO: 39 - protein, 31 aa, Artificial Sequence
  Synthetic
MLKQINVIAGVKEPIRAYACTNPDPCTDEEI

SEQ ID NO: 40 - protein, 31 aa, Artificial Sequence
  Synthetic
MLKQINVIAGVKEPIRAYKCDEGDHCGTKDL

SEQ ID NO: 41 - protein, 31 aa, Artificial Sequence
  Synthetic
MLKQINVIAGVKEPIRAYPCEVLDNCTKPDH

SEQ ID NO: 42 - protein, 31 aa, Artificial Sequence
  Synthetic
MLKQINVIAGVKEPIRAYPCEVLDNCTNPDH

SEQ ID NO: 43 - protein, 31 aa, Artificial Sequence
  Synthetic
MLKQINVIAGVKEPIRAYQCPWHERCDQCEP

SEQ ID NO: 44 - protein, 31 aa, Artificial Sequence
  Synthetic
MLKQINVIAGVKEPIRAYVCKYGEWCEIVEI

SEQ ID NO: 45 - protein, 31 aa, Artificial Sequence
  Synthetic
MLKQINVIAGVKEPIRAYYCNITERCHSDEH

SEQ ID NO: 46 - protein, 18 aa, Artificial Sequence
  Synthetic
MLKQINVIAGVKEPIRAY

SEQ ID NO: 47 - DNA, 102 bp, Artificial Sequence
  Synthetic
atgctgaaacagatcaacgttattgcgggtgtgaaagagccgattcgcgcgtacgcctgtaccgcatgtgagcaatgcagtaaatgtgacaccaatgagaag

SEQ ID NO: 48 - DNA, 102 bp, Artificial Sequence
  Synthetic
atgctgaaacagataaacgtcattgcaggcgtcaaggaacccattcgcgcgtatgaatgtccggccgatgaaacttgtatgcattgcgaatcgcatgagatg

SEQ ID NO: 49 - DNA, 102 bp, Artificial Sequence
  Synthetic
atgctgaaacagatcaacgtgatagccggggtcaaagagcccattcgcgcatatcactgcatttttattgaaagctgtgacgtgtgcgaactgaatgaaccg

SEQ ID NO: 50 - DNA, 102 bp, Artificial Sequence
  Synthetic
atgctgaagcaaatcaacgttatcgccggagttaaggaacctattcgtgcgtataaatgtgaaaaacgggaagagtgtgctgattgcgatcaccttgaattt

SEQ ID NO: 51 - DNA, 102 bp, Artificial Sequence
  Synthetic
atgctcaaacagatcaacgtcattgccggcgtcaaagaaccaatccgtgcttacaagtgtacgtcaaaagaatgctgtatccagtgtgaaggaagtgaaagc

SEQ ID NO: 52 - DNA, 102 bp, Artificial Sequence
  Synthetic
atgttaaaacaaattaacgtgatcgccggggttaaagaacccatccgtgcgtatatgtgtgtattttgtgaaatttgtgtgatgtgtgacacccatgaaatg

SEQ ID NO: 53 - DNA, 102 bp, Artificial Sequence
  Synthetic
atgctgaagcagataaatgttatcgcgggcgtcaaggaaccgatccgtgcctatccgtgtggtaaacgcgagccgtgtaatacctgcgaacatttcgaaacg

SEQ ID NO: 54 - DNA, 102 bp, Artificial Sequence
  Synthetic
atgctgaaacagatcaacgtcattgctggtgttaaagaaccgattcgcgcttatccgtgtaccaccacggaagcgtgcacagcctgcgattctagtgatgcg

SEQ ID NO: 55 - DNA, 102 bp, Artificial Sequence
  Synthetic
atgctgaaacagattaacgttatcgcgggcgtcaaagaacccatcagagcgtatcgttgtcgttgccctgagaactgcctgtcgtgcgaaccgccggagcgt

SEQ ID NO: 56 - DNA, 102 bp, Artificial Sequence
  Synthetic
atgctgaagcaaatcaatgtgatcgcgggcgttaaagagccgatccgggcctactcttgtaccccggatgaagtatgtccgctctgcgagccatgcgaaccg

SEQ ID NO: 57 - DNA, 102 bp, Artificial Sequence
  Synthetic
atgctgaagcaaattaacgtgattgctggtgtcaaggaacctatccgtgcgtacacatgtacgatggcggagaaatgccaaatttgcgatgtgagcgaaggg

SEQ ID NO: 58 - DNA, 93 bp, Artificial Sequence
  Synthetic
atgctcaaacaaatcaacgtgatcgcgggagtcaaagcaccgatccgcgcctacgcttgcacaaacccggacccttgcacggatgaagaaatc

SEQ ID NO: 59 - DNA, 93 bp, Artificial Sequence
  Synthetic
atgcttaagcagataaacgtgatcgccggcgtgaaagcgccgatccgcgcgtacccgtgtgaagtgttggataattgcacaaatccagaccat

SEQ ID NO: 60 - DNA, 93 bp, Artificial Sequence
  Synthetic
atgctgaagcaaatcaatgtgattgccggggtaaaagaaccgatacgcgcgtacgcctgtactaaccctgatccgtgtaccgatgaggaaatc

SEQ ID NO: 61 - DNA, 93 bp, Artificial Sequence
  Synthetic
atgctgaaacagattaatgtgattgccggagttaaggaaccaattcgcgcttataaatgcgacgaaggtgatcattgtggcactaaagatctg

SEQ ID NO: 62 - DNA, 93 bp, Artificial Sequence
  Synthetic
atgctgaaacagattaatgtgatcgcgggtgtaaaggaaccgatcagagcgtatccatgcgaagttttagacaactgcactaaacccgaccac

SEQ ID NO: 63 - DNA, 93 bp, Artificial Sequence
  Synthetic
atgctgaaacaaattaacgttattgcgggtgttaaagaaccgatccgtgcctatccatgcgaggtgttggataattgcaccaaccctgatcat

SEQ ID NO: 64 - DNA, 93 bp, Artificial Sequence
  Synthetic
atgttaaagcagatcaatgtgatcgcaggggtgaaagaaccgatacgcgcataccagtgcccatggcatgaacgttgtgatcagtgcgagccg

SEQ ID NO: 65 - DNA, 93 bp, Artificial Sequence
  Synthetic
atgctgaagcagattaacgttattgccggagttaaagaacccatacgcgcgtacgtgtgtaaatatggtgaatggtgtgagatcgtcgaaatc

SEQ ID NO: 66 - DNA, 93 bp, Artificial Sequence
  Synthetic
atgcttaaacaaattaacgtgatcgctggtgttaaggaaccgatccgcgcgtattattgcaatatcaccgaacgctgccattcggatgagcat

SEQ ID NO: 67 - protein, 8 aa, Artificial Sequence
  Synthetic
GFIASNCW

SEQ ID NO: 68 - protein, 131 aa, Artificial Sequence
  Synthetic
CLSYETEILTVEYGLLPIGKIVEKRIECTVYSVDNNGNIYTQPVAQWHDRGEQEVFEYCLEDGSLIRATKDHKFMTVDGQMLPIDEIFERELDLMRVDNLPNIKIATRKYLGKQNVYDIGVERDHNFALKN

SEQ ID NO: 69 - protein, 88 aa, Artificial Sequence
  Synthetic
LDTRPAPDEQLEASAQSRRMAQALDQLPDRQREAIVLQYYQELSNTEAAALMQISVEALESLLSRARRNLRSHLAEAPGADLSGRRKP

SEQ ID NO: 70 - protein, 104 aa, Artificial Sequence
  Synthetic
NETDPDLELLKRIGNNDAQAVKEMVTRKLPRLLALASRLLGDADEARDIAQESFLRIWKQAASWRSEQARFDTWLHRVALNLCYDRLRRRKEHVPVDSEHACEA

SEQ ID NO: 71 - protein, 206 aa, Artificial Sequence
  Synthetic
RFPNITNLCPFGEVFNATRFASVYAWNRKRISNCVADYSVLYNSASFSTFKCYGVSPTKLNDLCFTNVYADSFVIRGDEVRQIAPGQTGKIADYNYKLPDDFTGCVIAWNSNNLDSKVGGNYNYLYRLFRKSNLKPFERDISTEIYQAGSTPCNGVEGFNCYFPLQSYGFQPTNGVGYQPYRVVVLSFELLHAPATVCGPKKSTNL

SEQ ID NO: 72 - protein, 38 aa, Artificial Sequence
  Synthetic
STIEEQAKTFLDKFNHEAEDLFYQSSLASWNYNTNITE

SEQ ID NO: 73 - DNA, 5430 bp, Artificial Sequence
  Synthetic
  misc_feature (501)..(502): n is a, c, g, or t
  misc_feature (504)..(505): n is a, c, g, or t
  misc_feature (507)..(508): n is a, c, g, or t
  misc_feature (510)..(511): n is a, c, g, or t
  misc_feature (513)..(514): n is a, c, g, or t
  misc_feature (531)..(532): n is a, c, g, or t
  misc_feature (534)..(535): n is a, c, g, or t
  misc_feature (537)..(538): n is a, c, g, or t
  misc_feature (540)..(541): n is a, c, g, or t
  misc_feature (543)..(544): n is a, c, g, or t
tgccacctgacgtctaagaagaattcgcggccgcttctagagggagccaattattgaaggcctccctaacggggggcctttttttgtttctggtctcccgcttaacgatcgttggctgacctgtaggatcgtacaggtttacgcaagaaaatggtttgttacagtcgaataaaagctgtcaccggatgtgctttccggtctgatgagtccgtgaggacgaaacagcctctacaaataattttgtttaatccatctctatggcggattttatgtcatattaccaccatcaccatcatcacatgtcagaagaacaactcaaggcattcattgccaaggttcaagcagacacttcactgcaggaacagctcaaagtagaaggtgctgatgttgttgctattgctaaagcctcagggttcgcgattaccacagagctggcggagctttctgaggaggctctgtctgatgatgagctggagggagtcgcgggaggcgcggcatgcnnknnknnknnknnkwcgatgccgcctwcgnnknnknnknnknnktgccgaggaggtaagggaggacctggaggtcggggaggtgttggaggtggtggaggaattggaggtggttttatcgcttccaactgctggctggatacccgtccggcaccggatgaacagctggaagcaagcgcacagagccgtcgtatggcacaggcactggatcagctgccggatcgtcagcgtgaagcaattgttctgcagtattatcaagaactgagcaataccgaagcagcagcactgatgcaaattagcgttgaagccctggaaagcctgctgagccgtgcacgtcgtaatctgcgtagccatctggccgaagcaccgggtgcagatctgagcggtcgtcgcaaaccgtaaaggtgatactttcagccaaaaaacttaagaccgccggtcttgtccactaccttgcagtaatgcggtggacaggatcggcggttttcttttctcttctcaaagaccgtccaatggcggcgcgccatcgaatggcgcaaaacctttcgcggtatggcatgatagcgcccggaagagagtcaattcagggtggtgaatatgaaaaacataaatgccgacgacacatacagaataattaataaaattaaagcttgtagaagcaataatgatattaatcaatgcttatctgatatgactaaaatggtacattgtgaatattatttactcgcgatcatttatcctcattctatggttaaatctgatatttcaatcctagataattaccctaaaaaatggaggcaatattatgatgacgctaatttaataaaatatgatcctatagtagattattctaactccaatcattcaccaattaattggaatatatttgaaaacaatgctgtaaataaaaaatctccaaatgtaattaaagaagcgaaaacatcaggtcttatcactgggtttagtttccctattcatacggctaacaatggcttcggaatgcttagttttgcacattcagaaaaagacaactatatagatagtttatttttacatgcgtgtatgaacataccattaattgttccttctctagttgataattatcgaaaaataaatatagcaaataataaatcaaacaacgatttaaccaaaagagaaaaagaatgtttagcgtgggcatgcgaaggaaaaagctcttgggatatttcaaaaatattaggttgcagtgagcgtactgtcactttccatttaaccaatgcgcaaatgaaactcaatacaacaaaccgctgccaaagtatttctaaagcaattttaacaggagcaattgattgcccatactttaaaaattgataaggatcctaattggtaacgaatcagacaattgacggctcgagggagtagcatagggtttgcagaatccctgcttcgtccatttgacaggcacattatgcatcgatgataagctgtcaaacatgagcagatcctctacgccggacgcatcgtggccggcatcaccggcgccacaggtgcggttgctggcgcctatatcgccgacatcaccgatggggaagatcgggctcgccacttcgggctcatgagcaaatattttatctggctcactcaaaggcggtaatgacagtaagacgggtaagcctgttgatgataccgctgccttactgggtgcattagccagtctgaatgacctgtcacgggataatccgaagtggtcagactggaaaatcagagggcaggaactgctgaacagcaaaaagtcagatagcaccacatagcagacccgccataaaacgccctgagaagcccgtgacgggcttttcttgtattatgggtagtttccttgcatgaatccataaaaggcgcctgtagtgccatttacccccattcactgccagagccgtgagcgcagcgaactgaatgtcacgaaaaagacagcgactcaggtgcctgatggtcggagacaaaaggaatattcagcgatttgcccgagcttgcgagggtgctacttaagcctttagggttttaaggtctgttttgtagaggagcaaacagcgtttgcgacatccttttgtaatactgcggaactgactaaagtagtgagttatacacagggctgggatctattctttttatctttttttattctttctttattctataaattataaccacttgaatataaacaaaaaaaacacacaaaggtctagcggaatttacagagggtctagcagaatttacaagttttccagcaaaggtctagcagaatttacagatacccacaactcaaaggaaaaggactagtaattatcattgactagcccatctcaattggtatagtgattaaaatcacctagaccaattgagatgtatgtctgaattagttgttttcaaagcaaatgaactagcgattagtcgctatgacttaacggagcatgaaaccaagctaattttatgctgtgtggcactactcaaccccacgattgaaaaccctacaaggaaagaacggacggtatcgttcacttataaccaatacgctcagatgatgaacatcagtagggaaaatgcttatggtgtattagctaaagcaaccagagagctgatgacgagaactgtggaaatcaggaatcctttggttaaaggcttttggattttccagtggacaaactatgccaagttctcaagcgaaaaattagaattagtttttagtgaagagatattgccttatcttttccagttaaaaaaattcataaaatataatctggaacatgttaagtcttttgaaaacaaatactctatgaggatttatgagtggttattaaaagaactaacacaaaagaaaactcacaaggcaaatatagagattagccttgatgaatttaagttcatgttaatgcttgaaaataactaccatgagtttaaaaggcttaaccaatgggttttgaaaccaataagtaaagatttaaacacttacagcaatatgaaattggtggttgataagcgaggccgcccgactgatacgttgattttccaagttgaactagatagacaaatggatctcgtaaccgaacttgagaacaaccagataaaaatgaatggtgacaaaataccaacaaccattacatcagattcctacctacataacggactaagaaaaacactacacgatgctttaactgcaaaaattcagctcaccagttttgaggcaaaatttttgagtgacatgcaaagtaagtatgatctcaatggttcgttctcatggctcacgcaaaaacaacgaaccacactagagaacatactggctaaatacggaaggatctgaggttcttatggctcttgtatctatcagtgaagcatcaagactaacaaacaaaagtagaacaactgttcaccgttacatatcaaagggaaaactgtccatatgcacagatgaaaacggtgtaaaaaagatagatacatcagagcttttacgagtttttggtgcattcaaagctgttcaccatgaacagatcgacaatgtaacagatgaacagcatgtaacacctaatagaacaggtgaaaccagtaaaacaaagcaactagaacatgaaattgaacacctgagacaacttgttacagctcaacagtcacacatagacagcctgaaacaggcgatgctgcttatcgaatcaaagctgccgacaacacgggagccagtgacgcctcccgtggggaaaaaatcatggcaattctggaagaaatagcgctttcagccggcaaaccggctgaagccggatctgcgattctgataacaaactagcaacaccagaacagcccgtttgcgggcagcaaaacccgtaccgattatcaaaaaggatcttcacctagatccttttaaattaaaaatgaagttttaaatcaatctaaagtatatatgagtaaacttggtctgacagttaccaatgcttaatcagtgaggcacctatctcagcgatctgtctatttcgttcatccatagttgcctgactccccgtcgtgtagataactacgatacgggagggcttaccatctggccccagtgctgcaatgataccgcgagaaccacgctcaccggctccagatttatcagcaataaaccagccagccggaagggccgagcgcagaagtggtcctgcaactttatccgcctccatccagtctattaattgttgccgggaagctagagtaagtagttcgccagttaatagtttgcgcaacgttgttgccattgctacaggcatcgtggtgtcacgctcgtcgtttggtatggcttcattcagctccggttcccaacgatcaaggcgagttacatgatcccccatgttgtgcaaaaaagcggttagctccttcggtcctccgatcgttgtcagaagtaagttggccgcagtgttatcactcatggttatggcagcactgcataattctcttactgtcatgccatccgtaagatgcttttctgtgactggtgagtactcaaccaagtcattctgagaatagtgtatgcggcgaccgagttgctcttgcccggcgtcaatacgggataataccgcgccacatagcagaactttaaaagtgctcatcattggaaaacgttcttcggggcgaaaactctcaaggatcttaccgctgttgagatccagttcgatataacccactcgtgcacccaactgatcttcagcatcttttactttcaccagcgtttctgggtgagcaaaaacaggaaggcaaaatgccgcaaaaaagggaataagggcgacacggaaatgttgaatactcatactcttcctttttcaatattattgaagcatttatcagggttattgtctcatgagcggatacatatttgaatgtatttagaaaaataaacaaataggggttccgcgcacatttccccgaaaag

SEQ ID NO: 74 - DNA, 5373 bp, Artificial Sequence
  Synthetic
  misc_feature (429)..(430): n is a, c, g, or t
  misc_feature (437)..(437): n is a, c, g, or t
  misc_feature (444)..(445): n is a, c, g, or t
  misc_feature (447)..(448): n is a, c, g, or t
  misc_feature (453)..(454): n is a, c, g, or t
  misc_feature (459)..(459): n is a, c, g, or t
  misc_feature (465)..(466): n is a, c, g, or t
  misc_feature (468)..(469): n is a, c, g, or t
  misc_feature (474)..(475): n is a, c, g, or t
  misc_feature (483)..(484): n is a, c, g, or t
  misc_feature (486)..(487): n is a, c, g, or t
  misc_feature (489)..(490): n is a, c, g, or t
tgccacctgacgtctaagaagaattcgcggccgcttctagagggagccaattattgaaggcctccctaacggggggcctttttttgtttctggtctcccgcttaacgatcgttggctgacctgtaggatcgtacaggtttacgcaagaaaatggtttgttacagtcgaataaaagctgtcaccggatgtgctttccggtctgatgagtccgtgaggacgaaacagcctctacaaataattttgtttaatccatctctatggcggattttatgtcatattaccaccatcaccatcatcacatgtatcgaccttatattgccaagtatgtcgaagaacaaactctgcagaattcaaccaacctggtatatgacgacatcacgcagctggcggagctttctgaggaggctctggtgaaaaaaattaatctgnnkcccvanactacgnnknnkactnnkdyknttgagnnknnkgacnnkgatgagnnknnknnkcgaggaggtaagggaggacctggaggtcggggaggtgttggaggtggtggaggaattggaggtggttttatcgcttccaactgctggctggatacccgtccggcaccggatgaacagctggaagcaagcgcacagagccgtcgtatggcacaggcactggatcagctgccggatcgtcagcgtgaagcaattgttctgcagtattatcaagaactgagcaataccgaagcagcagcactgatgcaaattagcgttgaagccctggaaagcctgctgagccgtgcacgtcgtaatctgcgtagccatctggccgaagcaccgggtgcagatctgagcggtcgtcgcaaaccgtaaaggtgatactttcagccaaaaaacttaagaccgccggtcttgtccactaccttgcagtaatgcggtggacaggatcggcggttttcttttctcttctcaaagaccgtccaatggcggcgcgccatcgaatggcgcaaaacctttcgcggtatggcatgatagcgcccggaagagagtcaattcagggtggtgaatatgaaaaacataaatgccgacgacacatacagaataattaataaaattaaagcttgtagaagcaataatgatattaatcaatgcttatctgatatgactaaaatggtacattgtgaatattatttactcgcgatcatttatcctcattctatggttaaatctgatatttcaatcctagataattaccctaaaaaatggaggcaatattatgatgacgctaatttaataaaatatgatcctatagtagattattctaactccaatcattcaccaattaattggaatatatttgaaaacaatgctgtaaataaaaaatctccaaatgtaattaaagaagcgaaaacatcaggtcttatcactgggtttagtttccctattcatacggctaacaatggcttcggaatgcttagttttgcacattcagaaaaagacaactatatagatagtttatttttacatgcgtgtatgaacataccattaattgttccttctctagttgataattatcgaaaaataaatatagcaaataataaatcaaacaacgatttaaccaaaagagaaaaagaatgtttagcgtgggcatgcgaaggaaaaagctcttgggatatttcaaaaatattaggttgcagtgagcgtactgtcactttccatttaaccaatgcgcaaatgaaactcaatacaacaaaccgctgccaaagtatttctaaagcaattttaacaggagcaattgattgcccatactttaaaaattgataaggatcctaattggtaacgaatcagacaattgacggctcgagggagtagcatagggtttgcagaatccctgcttcgtccatttgacaggcacattatgcatcgatgataagctgtcaaacatgagcagatcctctacgccggacgcatcgtggccggcatcaccggcgccacaggtgcggttgctggcgcctatatcgccgacatcaccgatggggaagatcgggctcgccacttcgggctcatgagcaaatattttatctggctcactcaaaggcggtaatgacagtaagacgggtaagcctgttgatgataccgctgccttactgggtgcattagccagtctgaatgacctgtcacgggataatccgaagtggtcagactggaaaatcagagggcaggaactgctgaacagcaaaaagtcagatagcaccacatagcagacccgccataaaacgccctgagaagcccgtgacgggcttttcttgtattatgggtagtttccttgcatgaatccataaaaggcgcctgtagtgccatttacccccattcactgccagagccgtgagcgcagcgaactgaatgtcacgaaaaagacagcgactcaggtgcctgatggtcggagacaaaaggaatattcagcgatttgcccgagcttgcgagggtgctacttaagcctttagggttttaaggtctgttttgtagaggagcaaacagcgtttgcgacatccttttgtaatactgcggaactgactaaagtagtgagttatacacagggctgggatctattctttttatctttttttattctttctttattctataaattataaccacttgaatataaacaaaaaaaacacacaaaggtctagcggaatttacagagggtctagcagaatttacaagttttccagcaaaggtctagcagaatttacagatacccacaactcaaaggaaaaggactagtaattatcattgactagcccatctcaattggtatagtgattaaaatcacctagaccaattgagatgtatgtctgaattagttgttttcaaagcaaatgaactagcgattagtcgctatgacttaacggagcatgaaaccaagctaattttatgctgtgtggcactactcaaccccacgattgaaaaccctacaaggaaagaacggacggtatcgttcacttataaccaatacgctcagatgatgaacatcagtagggaaaatgcttatggtgtattagctaaagcaaccagagagctgatgacgagaactgtggaaatcaggaatcctttggttaaaggcttttggattttccagtggacaaactatgccaagttctcaagcgaaaaattagaattagtttttagtgaagagatattgccttatcttttccagttaaaaaaattcataaaatataatctggaacatgttaagtcttttgaaaacaaatactctatgaggatttatgagtggttattaaaagaactaacacaaaagaaaactcacaaggcaaatatagagattagccttgatgaatttaagttcatgttaatgcttgaaaataactaccatgagtttaaaaggcttaaccaatgggttttgaaaccaataagtaaagatttaaacacttacagcaatatgaaattggtggttgataagcgaggccgcccgactgatacgttgattttccaagttgaactagatagacaaatggatctcgtaaccgaacttgagaacaaccagataaaaatgaatggtgacaaaataccaacaaccattacatcagattcctacctacataacggactaagaaaaacactacacgatgctttaactgcaaaaattcagctcaccagttttgaggcaaaatttttgagtgacatgcaaagtaagtatgatctcaatggttcgttctcatggctcacgcaaaaacaacgaaccacactagagaacatactggctaaatacggaaggatctgaggttcttatggctcttgtatctatcagtgaagcatcaagactaacaaacaaaagtagaacaactgttcaccgttacatatcaaagggaaaactgtccatatgcacagatgaaaacggtgtaaaaaagatagatacatcagagcttttacgagtttttggtgcattcaaagctgttcaccatgaacagatcgacaatgtaacagatgaacagcatgtaacacctaatagaacaggtgaaaccagtaaaacaaagcaactagaacatgaaattgaacacctgagacaacttgttacagctcaacagtcacacatagacagcctgaaacaggcgatgctgcttatcgaatcaaagctgccgacaacacgggagccagtgacgcctcccgtggggaaaaaatcatggcaattctggaagaaatagcgctttcagccggcaaaccggctgaagccggatctgcgattctgataacaaactagcaacaccagaacagcccgtttgcgggcagcaaaacccgtaccgattatcaaaaaggatcttcacctagatccttttaaattaaaaatgaagttttaaatcaatctaaagtatatatgagtaaacttggtctgacagttaccaatgcttaatcagtgaggcacctatctcagcgatctgtctatttcgttcatccatagttgcctgactccccgtcgtgtagataactacgatacgggagggcttaccatctggccccagtgctgcaatgataccgcgagaaccacgctcaccggctccagatttatcagcaataaaccagccagccggaagggccgagcgcagaagtggtcctgcaactttatccgcctccatccagtctattaattgttgccgggaagctagagtaagtagttcgccagttaatagtttgcgcaacgttgttgccattgctacaggcatcgtggtgtcacgctcgtcgtttggtatggcttcattcagctccggttcccaacgatcaaggcgagttacatgatcccccatgttgtgcaaaaaagcggttagctccttcggtcctccgatcgttgtcagaagtaagttggccgcagtgttatcactcatggttatggcagcactgcataattctcttactgtcatgccatccgtaagatgcttttctgtgactggtgagtactcaaccaagtcattctgagaatagtgtatgcggcgaccgagttgctcttgcccggcgtcaatacgggataataccgcgccacatagcagaactttaaaagtgctcatcattggaaaacgttcttcggggcgaaaactctcaaggatcttaccgctgttgagatccagttcgatataacccactcgtgcacccaactgatcttcagcatcttttactttcaccagcgtttctgggtgagcaaaaacaggaaggcaaaatgccgcaaaaaagggaataagggcgacacggaaatgttgaatactcatactcttcctttttcaatattattgaagcatttatcagggttattgtctcatgagcggatacatatttgaatgtatttagaaaaataaacaaataggggttccgcgcacatttccccgaaaag

SEQ ID NO: 75 - DNA, 5274 bp, Artificial Sequence
  Synthetic
  misc_feature (354)..(355): n is a, c, g, or t
  misc_feature (360)..(361): n is a, c, g, or t
  misc_feature (363)..(364): n is a, c, g, or t
  misc_feature (366)..(367): n is a, c, g, or t
  misc_feature (372)..(373): n is a, c, g, or t
  misc_feature (378)..(379): n is a, c, g, or t
  misc_feature (381)..(382): n is a, c, g, or t
  misc_feature (384)..(385): n is a, c, g, or t
  misc_feature (390)..(391): n is a, c, g, or t
tgccacctgacgtctaagaagaattcgcggccgcttctagagggagccaattattgaaggcctccctaacggggggcctttttttgtttctggtctcccgcttaacgatcgttggctgacctgtaggatcgtacaggtttacgcaagaaaatggtttgttacagtcgaataaaagctgtcaccggatgtgctttccggtctgatgagtccgtgaggacgaaacagcctctacaaataattttgtttaatccatctctatggcggattttatgtcatattaccaccatcaccatcatcacatgttgaaacagatcaatgtgattgctggcgtaaaagagcctattcgcgcctatnnktgtnnknnknnkgawnnktgcnnknnknnkgawnnkcgaggaggtaagggaggacctggaggtcggggaggtgttggaggtggtggaggaattggaggtggttttatcgcttccaactgctggctggatacccgtccggcaccggatgaacagctggaagcaagcgcacagagccgtcgtatggcacaggcactggatcagctgccggatcgtcagcgtgaagcaattgttctgcagtattatcaagaactgagcaataccgaagcagcagcactgatgcaaattagcgttgaagccctggaaagcctgctgagccgtgcacgtcgtaatctgcgtagccatctggccgaagcaccgggtgcagatctgagcggtcgtcgcaaaccgtaaaggtgatactttcagccaaaaaacttaagaccgccggtcttgtccactaccttgcagtaatgcggtggacaggatcggcggttttcttttctcttctcaaagaccgtccaatggcggcgcgccatcgaatggcgcaaaacctttcgcggtatggcatgatagcgcccggaagagagtcaattcagggtggtgaatatgaaaaacataaatgccgacgacacatacagaataattaataaaattaaagcttgtagaagcaataatgatattaatcaatgcttatctgatatgactaaaatggtacattgtgaatattatttactcgcgatcatttatcctcattctatggttaaatctgatatttcaatcctagataattaccctaaaaaatggaggcaatattatgatgacgctaatttaataaaatatgatcctatagtagattattctaactccaatcattcaccaattaattggaatatatttgaaaacaatgctgtaaataaaaaatctccaaatgtaattaaagaagcgaaaacatcaggtcttatcactgggtttagtttccctattcatacggctaacaatggcttcggaatgcttagttttgcacattcagaaaaagacaactatatagatagtttatttttacatgcgtgtatgaacataccattaattgttccttctctagttgataattatcgaaaaataaatatagcaaataataaatcaaacaacgatttaaccaaaagagaaaaagaatgtttagcgtgggcatgcgaaggaaaaagctcttgggatatttcaaaaatattaggttgcagtgagcgtactgtcactttccatttaaccaatgcgcaaatgaaactcaatacaacaaaccgctgccaaagtatttctaaagcaattttaacaggagcaattgattgcccatactttaaaaattgataaggatcctaattggtaacgaatcagacaattgacggctcgagggagtagcatagggtttgcagaatccctgcttcgtccatttgacaggcacattatgcatcgatgataagctgtcaaacatgagcagatcctctacgccggacgcatcgtggccggcatcaccggcgccacaggtgcggttgctggcgcctatatcgccgacatcaccgatggggaagatcgggctcgccacttcgggctcatgagcaaatattttatctggctcactcaaaggcggtaatgacagtaagacgggtaagcctgttgatgataccgctgccttactgggtgcattagccagtctgaatgacctgtcacgggataatccgaagtggtcagactggaaaatcagagggcaggaactgctgaacagcaaaaagtcagatagcaccacatagcagacccgccataaaacgccctgagaagcccgtgacgggcttttcttgtattatgggtagtttccttgcatgaatccataaaaggcgcctgtagtgccatttacccccattcactgccagagccgtgagcgcagcgaactgaatgtcacgaaaaagacagcgactcaggtgcctgatggtcggagacaaaaggaatattcagcgatttgcccgagcttgcgagggtgctacttaagcctttagggttttaaggtctgttttgtagaggagcaaacagcgtttgcgacatccttttgtaatactgcggaactgactaaagtagtgagttatacacagggctgggatctattctttttatctttttttattctttctttattctataaattataaccacttgaatataaacaaaaaaaacacacaaaggtctagcggaatttacagagggtctagcagaatttacaagttttccagcaaaggtctagcagaatttacagatacccacaactcaaaggaaaaggactagtaattatcattgactagcccatctcaattggtatagtgattaaaatcacctagaccaattgagatgtatgtctgaattagttgttttcaaagcaaatgaactagcgattagtcgctatgacttaacggagcatgaaaccaagctaattttatgctgtgtggcactactcaaccccacgattgaaaaccctacaaggaaagaacggacggtatcgttcacttataaccaatacgctcagatgatgaacatcagtagggaaaatgcttatggtgtattagctaaagcaaccagagagctgatgacgagaactgtggaaatcaggaatcctttggttaaaggcttttggattttccagtggacaaactatgccaagttctcaagcgaaaaattagaattagtttttagtgaagagatattgccttatcttttccagttaaaaaaattcataaaatataatctggaacatgttaagtcttttgaaaacaaatactctatgaggatttatgagtggttattaaaagaactaacacaaaagaaaactcacaaggcaaatatagagattagccttgatgaatttaagttcatgttaatgcttgaaaataactaccatgagtttaaaaggcttaaccaatgggttttgaaaccaataagtaaagatttaaacacttacagcaatatgaaattggtggttgataagcgaggccgcccgactgatacgttgattttccaagttgaactagatagacaaatggatctcgtaaccgaacttgagaacaaccagataaaaatgaatggtgacaaaataccaacaaccattacatcagattcctacctacataacggactaagaaaaacactacacgatgctttaactgcaaaaattcagctcaccagttttgaggcaaaatttttgagtgacatgcaaagtaagtatgatctcaatggttcgttctcatggctcacgcaaaaacaacgaaccacactagagaacatactggctaaatacggaaggatctgaggttcttatggctcttgtatctatcagtgaagcatcaagactaacaaacaaaagtagaacaactgttcaccgttacatatcaaagggaaaactgtccatatgcacagatgaaaacggtgtaaaaaagatagatacatcagagcttttacgagtttttggtgcattcaaagctgttcaccatgaacagatcgacaatgtaacagatgaacagcatgtaacacctaatagaacaggtgaaaccagtaaaacaaagcaactagaacatgaaattgaacacctgagacaacttgttacagctcaacagtcacacatagacagcctgaaacaggcgatgctgcttatcgaatcaaagctgccgacaacacgggagccagtgacgcctcccgtggggaaaaaatcatggcaattctggaagaaatagcgctttcagccggcaaaccggctgaagccggatctgcgattctgataacaaactagcaacaccagaacagcccgtttgcgggcagcaaaacccgtaccgattatcaaaaaggatcttcacctagatccttttaaattaaaaatgaagttttaaatcaatctaaagtatatatgagtaaacttggtctgacagttaccaatgcttaatcagtgaggcacctatctcagcgatctgtctatttcgttcatccatagttgcctgactccccgtcgtgtagataactacgatacgggagggcttaccatctggccccagtgctgcaatgataccgcgagaaccacgctcaccggctccagatttatcagcaataaaccagccagccggaagggccgagcgcagaagtggtcctgcaactttatccgcctccatccagtctattaattgttgccgggaagctagagtaagtagttcgccagttaatagtttgcgcaacgttgttgccattgctacaggcatcgtggtgtcacgctcgtcgtttggtatggcttcattcagctccggttcccaacgatcaaggcgagttacatgatcccccatgttgtgcaaaaaagcggttagctccttcggtcctccgatcgttgtcagaagtaagttggccgcagtgttatcactcatggttatggcagcactgcataattctcttactgtcatgccatccgtaagatgcttttctgtgactggtgagtactcaaccaagtcattctgagaatagtgtatgcggcgaccgagttgctcttgcccggcgtcaatacgggataataccgcgccacatagcagaactttaaaagtgctcatcattggaaaacgttcttcggggcgaaaactctcaaggatcttaccgctgttgagatccagttcgatataacccactcgtgcacccaactgatcttcagcatcttttactttcaccagcgtttctgggtgagcaaaaacaggaaggcaaaatgccgcaaaaaagggaataagggcgacacggaaatgttgaatactcatactcttcctttttcaatattattgaagcatttatcagggttattgtctcatgagcggatacatatttgaatgtatttagaaaaataaacaaataggggttccgcgcacatttccccgaaaag

SEQ ID NO: 76 - DNA, 5268 bp, Artificial Sequence
  Synthetic
  misc_feature (354)..(355): n is a, c, g, or t
  misc_feature (360)..(361): n is a, c, g, or t
  misc_feature (363)..(364): n is a, c, g, or t
  misc_feature (372)..(373): n is a, c, g, or t
  misc_feature (375)..(376): n is a, c, g, or t
  misc_feature (381)..(382): n is a, c, g, or t
  misc_feature (384)..(385): n is a, c, g, or t
tgccacctgacgtctaagaagaattcgcggccgcttctagagggagccaattattgaaggcctccctaacggggggcctttttttgtttctggtctcccgcttaacgatcgttggctgacctgtaggatcgtacaggtttacgcaagaaaatggtttgttacagtcgaataaaagctgtcaccggatgtgctttccggtctgatgagtccgtgaggacgaaacagcctctacaaataattttgtttaatccatctctatggcggattttatgtcatattaccaccatcaccatcatcacatgttgaaacagatcaatgtgattgctggcgtaaaagagcctattcgcgcctatnnktgcnnknnktgcgawnnknnkgawnnknnkcgaggaggtaagggaggacctggaggtcggggaggtgttggaggtggtggaggaattggaggtggttttatcgcttccaactgctggctggatacccgtccggcaccggatgaacagctggaagcaagcgcacagagccgtcgtatggcacaggcactggatcagctgccggatcgtcagcgtgaagcaattgttctgcagtattatcaagaactgagcaataccgaagcagcagcactgatgcaaattagcgttgaagccctggaaagcctgctgagccgtgcacgtcgtaatctgcgtagccatctggccgaagcaccgggtgcagatctgagcggtcgtcgcaaaccgtaaaggtgatactttcagccaaaaaacttaagaccgccggtcttgtccactaccttgcagtaatgcggtggacaggatcggcggttttcttttctcttctcaaagaccgtccaatggcggcgcgccatcgaatggcgcaaaacctttcgcggtatggcatgatagcgcccggaagagagtcaattcagggtggtgaatatgaaaaacataaatgccgacgacacatacagaataattaataaaattaaagcttgtagaagcaataatgatattaatcaatgcttatctgatatgactaaaatggtacattgtgaatattatttactcgcgatcatttatcctcattctatggttaaatctgatatttcaatcctagataattaccctaaaaaatggaggcaatattatgatgacgctaatttaataaaatatgatcctatagtagattattctaactccaatcattcaccaattaattggaatatatttgaaaacaatgctgtaaataaaaaatctccaaatgtaattaaagaagcgaaaacatcaggtcttatcactgggtttagtttccctattcatacggctaacaatggcttcggaatgcttagttttgcacattcagaaaaagacaactatatagatagtttatttttacatgcgtgtatgaacataccattaattgttccttctctagttgataattatcgaaaaataaatatagcaaataataaatcaaacaacgatttaaccaaaagagaaaaagaatgtttagcgtgggcatgcgaaggaaaaagctcttgggatatttcaaaaatattaggttgcagtgagcgtactgtcactttccatttaaccaatgcgcaaatgaaactcaatacaacaaaccgctgccaaagtatttctaaagcaattttaacaggagcaattgattgcccatactttaaaaattgataaggatcctaattggtaacgaatcagacaattgacggctcgagggagtagcatagggtttgcagaatccctgcttcgtccatttgacaggcacattatgcatcgatgataagctgtcaaacatgagcagatcctctacgccggacgcatcgtggccggcatcaccggcgccacaggtgcggttgctggcgcctatatcgccgacatcaccgatggggaagatcgggctcgccacttcgggctcatgagcaaatattttatctggctcactcaaaggcggtaatgacagtaagacgggtaagcctgttgatgataccgctgccttactgggtgcattagccagtctgaatgacctgtcacgggataatccgaagtggtcagactggaaaatcagagggcaggaactgctgaacagcaaaaagtcagatagcaccacatagcagacccgccataaaacgccctgagaagcccgtgacgggcttttcttgtattatgggtagtttccttgcatgaatccataaaaggcgcctgtagtgccatttacccccattcactgccagagccgtgagcgcagcgaactgaatgtcacgaaaaagacagcgactcaggtgcctgatggtcggagacaaaaggaatattcagcgatttgcccgagcttgcgagggtgctacttaagcctttagggttttaaggtctgttttgtagaggagcaaacagcgtttgcgacatccttttgtaatactgcggaactgactaaagtagtgagttatacacagggctgggatctattctttttatctttttttattctttctttattctataaattataaccacttgaatataaacaaaaaaaacacacaaaggtctagcggaatttacagagggtctagcagaatttacaagttttccagcaaaggtctagcagaatttacagatacccacaactcaaaggaaaaggactagtaattatcattgactagcccatctcaattggtatagtgattaaaatcacctagaccaattgagatgtatgtctgaattagttgttttcaaagcaaatgaactagcgattagtcgctatgacttaacggagcatgaaaccaagctaattttatgctgtgtggcactactcaaccccacgattgaaaaccctacaaggaaagaacggacggtatcgttcacttataaccaatacgctcagatgatgaacatcagtagggaaaatgcttatggtgtattagctaaagcaaccagagagctgatgacgagaactgtggaaatcaggaatcctttggttaaaggcttttggattttccagtggacaaactatgccaagttctcaagcgaaaaattagaattagtttttagtgaagagatattgccttatcttttccagttaaaaaaattcataaaatataatctggaacatgttaagtcttttgaaaacaaatactctatgaggatttatgagtggttattaaaagaactaacacaaaagaaaactcacaaggcaaatatagagattagccttgatgaatttaagttcatgttaatgcttgaaaataactaccatgagtttaaaaggcttaaccaatgggttttgaaaccaataagtaaagatttaaacacttacagcaatatgaaattggtggttgataagcgaggccgcccgactgatacgttgattttccaagttgaactagatagacaaatggatctcgtaaccgaacttgagaacaaccagataaaaatgaatggtgacaaaataccaacaaccattacatcagattcctacctacataacggactaagaaaaacactacacgatgctttaactgcaaaaattcagctcaccagttttgaggcaaaatttttgagtgacatgcaaagtaagtatgatctcaatggttcgttctcatggctcacgcaaaaacaacgaaccacactagagaacatactggctaaatacggaaggatctgaggttcttatggctcttgtatctatcagtgaagcatcaagactaacaaacaaaagtagaacaactgttcaccgttacatatcaaagggaaaactgtccatatgcacagatgaaaacggtgtaaaaaagatagatacatcagagcttttacgagtttttggtgcattcaaagctgttcaccatgaacagatcgacaatgtaacagatgaacagcatgtaacacctaatagaacaggtgaaaccagtaaaacaaagcaactagaacatgaaattgaacacctgagacaacttgttacagctcaacagtcacacatagacagcctgaaacaggcgatgctgcttatcgaatcaaagctgccgacaacacgggagccagtgacgcctcccgtggggaaaaaatcatggcaattctggaagaaatagcgctttcagccggcaaaccggctgaagccggatctgcgattctgataacaaactagcaacaccagaacagcccgtttgcgggcagcaaaacccgtaccgattatcaaaaaggatcttcacctagatccttttaaattaaaaatgaagttttaaatcaatctaaagtatatatgagtaaacttggtctgacagttaccaatgcttaatcagtgaggcacctatctcagcgatctgtctatttcgttcatccatagttgcctgactccccgtcgtgtagataactacgatacgggagggcttaccatctggccccagtgctgcaatgataccgcgagaaccacgctcaccggctccagatttatcagcaataaaccagccagccggaagggccgagcgcagaagtggtcctgcaactttatccgcctccatccagtctattaattgttgccgggaagctagagtaagtagttcgccagttaatagtttgcgcaacgttgttgccattgctacaggcatcgtggtgtcacgctcgtcgtttggtatggcttcattcagctccggttcccaacgatcaaggcgagttacatgatcccccatgttgtgcaaaaaagcggttagctccttcggtcctccgatcgttgtcagaagtaagttggccgcagtgttatcactcatggttatggcagcactgcataattctcttactgtcatgccatccgtaagatgcttttctgtgactggtgagtactcaaccaagtcattctgagaatagtgtatgcggcgaccgagttgctcttgcccggcgtcaatacgggataataccgcgccacatagcagaactttaaaagtgctcatcattggaaaacgttcttcggggcgaaaactctcaaggatcttaccgctgttgagatccagttcgatataacccactcgtgcacccaactgatcttcagcatcttttactttcaccagcgtttctgggtgagcaaaaacaggaaggcaaaatgccgcaaaaaagggaataagggcgacacggaaatgttgaatactcatactcttcctttttcaatattattgaagcatttatcagggttattgtctcatgagcggatacatatttgaatgtatttagaaaaataaacaaataggggttccgcgcacatttccccgaaaag

SEQ ID NO: 77 - DNA, 5283 bp, Artificial Sequence
  Synthetic
  misc_feature (354)..(355): n is a, c, g, or t
  misc_feature (360)..(361): n is a, c, g, or t
  misc_feature (363)..(364): n is a, c, g, or t
  misc_feature (366)..(367): n is a, c, g, or t
  misc_feature (372)..(373): n is a, c, g, or t
  misc_feature (378)..(379): n is a, c, g, or t
  misc_feature (381)..(382): n is a, c, g, or t
  misc_feature (390)..(391): n is a, c, g, or t
  misc_feature (393)..(394): n is a, c, g, or t
  misc_feature (399)..(400): n is a, c, g, or t
tgccacctgacgtctaagaagaattcgcggccgcttctagagggagccaattattgaaggcctccctaacggggggcctttttttgtttctggtctcccgcttaacgatcgttggctgacctgtaggatcgtacaggtttacgcaagaaaatggtttgttacagtcgaataaaagctgtcaccggatgtgctttccggtctgatgagtccgtgaggacgaaacagcctctacaaataattttgtttaatccatctctatggcggattttatgtcatattaccaccatcaccatcatcacatgttgaaacagatcaatgtgattgctggcgtaaaagagcctattcgcgcctatnnktgtnnknnknnkgawnnktgcnnknnktgcgawnnknnkgawnnkcgaggaggtaagggaggacctggaggtcggggaggtgttggaggtggtggaggaattggaggtggttttatcgcttccaactgctggctggatacccgtccggcaccggatgaacagctggaagcaagcgcacagagccgtcgtatggcacaggcactggatcagctgccggatcgtcagcgtgaagcaattgttctgcagtattatcaagaactgagcaataccgaagcagcagcactgatgcaaattagcgttgaagccctggaaagcctgctgagccgtgcacgtcgtaatctgcgtagccatctggccgaagcaccgggtgcagatctgagcggtcgtcgcaaaccgtaaaggtgatactttcagccaaaaaacttaagaccgccggtcttgtccactaccttgcagtaatgcggtggacaggatcggcggttttcttttctcttctcaaagaccgtccaatggcggcgcgccatcgaatggcgcaaaacctttcgcggtatggcatgatagcgcccggaagagagtcaattcagggtggtgaatatgaaaaacataaatgccgacgacacatacagaataattaataaaattaaagcttgtagaagcaataatgatattaatcaatgcttatctgatatgactaaaatggtacattgtgaatattatttactcgcgatcatttatcctcattctatggttaaatctgatatttcaatcctagataattaccctaaaaaatggaggcaatattatgatgacgctaatttaataaaatatgatcctatagtagattattctaactccaatcattcaccaattaattggaatatatttgaaaacaatgctgtaaataaaaaatctccaaatgtaattaaagaagcgaaaacatcaggtcttatcactgggtttagtttccctattcatacggctaacaatggcttcggaatgcttagttttgcacattcagaaaaagacaactatatagatagtttatttttacatgcgtgtatgaacataccattaattgttccttctctagttgataattatcgaaaaataaatatagcaaataataaatcaaacaacgatttaaccaaaagagaaaaagaatgtttagcgtgggcatgcgaaggaaaaagctcttgggatatttcaaaaatattaggttgcagtgagcgtactgtcactttccatttaaccaatgcgcaaatgaaactcaatacaacaaaccgctgccaaagtatttctaaagcaattttaacaggagcaattgattgcccatactttaaaaattgataaggatcctaattggtaacgaatcagacaattgacggctcgagggagtagcatagggtttgcagaatccctgcttcgtccatttgacaggcacattatgcatcgatgataagctgtcaaacatgagcagatcctctacgccggacgcatcgtggccggcatcaccggcgccacaggtgcggttgctggcgcctatatcgccgacatcaccgatggggaagatcgggctcgccacttcgggctcatgagcaaatattttatctggctcactcaaaggcggtaatgacagtaagacgggtaagcctgttgatgataccgctgccttactgggtgcattagccagtctgaatgacctgtcacgggataatccgaagtggtcagactggaaaatcagagggcaggaactgctgaacagcaaaaagtcagatagcaccacatagcagacccgccataaaacgccctgagaagcccgtgacgggcttttcttgtattatgggtagtttccttgcatgaatccataaaaggcgcctgtagtgccatttacccccattcactgccagagccgtgagcgcagcgaactgaatgtcacgaaaaagacagcgactcaggtgcctgatggtcggagacaaaaggaatattcagcgatttgcccgagcttgcgagggtgctacttaagcctttagggttttaaggtctgttttgtagaggagcaaacagcgtttgcgacatccttttgtaatactgcggaactgactaaagtagtgagttatacacagggctgggatctattctttttatctttttttattctttctttattctataaattataaccacttgaatataaacaaaaaaaacacacaaaggtctagcggaatttacagagggtctagcagaatttacaagttttccagcaaaggtctagcagaatttacagatacccacaactcaaaggaaaaggactagtaattatcattgactagcccatctcaattggtatagtgattaaaatcacctagaccaattgagatgtatgtctgaattagttgttttcaaagcaaatgaactagcgattagtcgctatgacttaacggagcatgaaaccaagctaattttatgctgtgtggcactactcaaccccacgattgaaaaccctacaaggaaagaacggacggtatcgttcacttataaccaatacgctcagatgatgaacatcagtagggaaaatgcttatggtgtattagctaaagcaaccagagagctgatgacgagaactgtggaaatcaggaatcctttggttaaaggcttttggattttccagtggacaaactatgccaagttctcaagcgaaaaattagaattagtttttagtgaagagatattgccttatcttttccagttaaaaaaattcataaaatataatctggaacatgttaagtcttttgaaaacaaatactctatgaggatttatgagtggttattaaaagaactaacacaaaagaaaactcacaaggcaaatatagagattagccttgatgaatttaagttcatgttaatgcttgaaaataactaccatgagtttaaaaggcttaaccaatgggttttgaaaccaataagtaaagatttaaacacttacagcaatatgaaattggtggttgataagcgaggccgcccgactgatacgttgattttccaagttgaactagatagacaaatggatctcgtaaccgaacttgagaacaaccagataaaaatgaatggtgacaaaataccaacaaccattacatcagattcctacctacataacggactaagaaaaacactacacgatgctttaactgcaaaaattcagctcaccagttttgaggcaaaatttttgagtgacatgcaaagtaagtatgatctcaatggttcgttctcatggctcacgcaaaaacaacgaaccacactagagaacatactggctaaatacggaaggatctgaggttcttatggctcttgtatctatcagtgaagcatcaagactaacaaacaaaagtagaacaactgttcaccgttacatatcaaagggaaaactgtccatatgcacagatgaaaacggtgtaaaaaagatagatacatcagagcttttacgagtttttggtgcattcaaagctgttcaccatgaacagatcgacaatgtaacagatgaacagcatgtaacacctaatagaacaggtgaaaccagtaaaacaaagcaactagaacatgaaattgaacacctgagacaacttgttacagctcaacagtcacacatagacagcctgaaacaggcgatgctgcttatcgaatcaaagctgccgacaacacgggagccagtgacgcctcccgtggggaaaaaatcatggcaattctggaagaaatagcgctttcagccggcaaaccggctgaagccggatctgcgattctgataacaaactagcaacaccagaacagcccgtttgcgggcagcaaaacccgtaccgattatcaaaaaggatcttcacctagatccttttaaattaaaaatgaagttttaaatcaatctaaagtatatatgagtaaacttggtctgacagttaccaatgcttaatcagtgaggcacctatctcagcgatctgtctatttcgttcatccatagttgcctgactccccgtcgtgtagataactacgatacgggagggcttaccatctggccccagtgctgcaatgataccgcgagaaccacgctcaccggctccagatttatcagcaataaaccagccagccggaagggccgagcgcagaagtggtcctgcaactttatccgcctccatccagtctattaattgttgccgggaagctagagtaagtagttcgccagttaatagtttgcgcaacgttgttgccattgctacaggcatcgtggtgtcacgctcgtcgtttggtatggcttcattcagctccggttcccaacgatcaaggcgagttacatgatcccccatgttgtgcaaaaaagcggttagctccttcggtcctccgatcgttgtcagaagtaagttggccgcagtgttatcactcatggttatggcagcactgcataattctcttactgtcatgccatccgtaagatgcttttctgtgactggtgagtactcaaccaagtcattctgagaatagtgtatgcggcgaccgagttgctcttgcccggcgtcaatacgggataataccgcgccacatagcagaactttaaaagtgctcatcattggaaaacgttcttcggggcgaaaactctcaaggatcttaccgctgttgagatccagttcgatataacccactcgtgcacccaactgatcttcagcatcttttactttcaccagcgtttctgggtgagcaaaaacaggaaggcaaaatgccgcaaaaaagggaataagggcgacacggaaatgttgaatactcatactcttcctttttcaatattattgaagcatttatcagggttattgtctcatgagcggatacatatttgaatgtatttagaaaaataaacaaataggggttccgcgcacatttccccgaaaag

SEQ ID NO: 78 - DNA, 5298 bp, Artificial Sequence
  Synthetic
tgccacctgacgtctaagaagaattcgcggccgcttctagagggagccaattattgaaggcctccctaacggggggcctttttttgtttctggtctcccgcttaacgatcgttggctgacctgtaggatcgtacaggtttacgcaagaaaatggtttgttacagtcgaataaaagctgtcaccggatgtgctttccggtctgatgagtccgtgaggacgaaacagcctctacaaataattttgtttaatccatctctatggcggattttatgtcatattaccaccatcaccatcatcacatgtcaacgatcgaagaacaggctaaaacgttcctggataagttcaatcatgaggcggaggacctgttctaccaaagcagcttggcctcttggaactacaacacgaacattacggagcgaggaggtaagggaggacctggaggtcggggaggtgttggaggtggtggaggaattggaggtggttttatcgcttccaactgctggctggatacccgtccggcaccggatgaacagctggaagcaagcgcacagagccgtcgtatggcacaggcactggatcagctgccggatcgtcagcgtgaagcaattgttctgcagtattatcaagaactgagcaataccgaagcagcagcactgatgcaaattagcgttgaagccctggaaagcctgctgagccgtgcacgtcgtaatctgcgtagccatctggccgaagcaccgggtgcagatctgagcggtcgtcgcaaaccgtaaaggtgatactttcagccaaaaaacttaagaccgccggtcttgtccactaccttgcagtaatgcggtggacaggatcggcggttttcttttctcttctcaaagaccgtccaatggcggcgcgccatcgaatggcgcaaaacctttcgcggtatggcatgatagcgcccggaagagagtcaattcagggtggtgaatatgaaaaacataaatgccgacgacacatacagaataattaataaaattaaagcttgtagaagcaataatgatattaatcaatgcttatctgatatgactaaaatggtacattgtgaatattatttactcgcgatcatttatcctcattctatggttaaatctgatatttcaatcctagataattaccctaaaaaatggaggcaatattatgatgacgctaatttaataaaatatgatcctatagtagattattctaactccaatcattcaccaattaattggaatatatttgaaaacaatgctgtaaataaaaaatctccaaatgtaattaaagaagcgaaaacatcaggtcttatcactgggtttagtttccctattcatacggctaacaatggcttcggaatgcttagttttgcacattcagaaaaagacaactatatagatagtttatttttacatgcgtgtatgaacataccattaattgttccttctctagttgataattatcgaaaaataaatatagcaaataataaatcaaacaacgatttaaccaaaagagaaaaagaatgtttagcgtgggcatgcgaaggaaaaagctcttgggatatttcaaaaatattaggttgcagtgagcgtactgtcactttccatttaaccaatgcgcaaatgaaactcaatacaacaaaccgctgccaaagtatttctaaagcaattttaacaggagcaattgattgcccatactttaaaaattgataaggatcctaattggtaacgaatcagacaattgacggctcgagggagtagcatagggtttgcagaatccctgcttcgtccatttgacaggcacattatgcatcgatgataagctgtcaaacatgagcagatcctctacgccggacgcatcgtggccggcatcaccggcgccacaggtgcggttgctggcgcctatatcgccgacatcaccgatggggaagatcgggctcgccacttcgggctcatgagcaaatattttatctggctcactcaaaggcggtaatgacagtaagacgggtaagcctgttgatgataccgctgccttactgggtgcattagccagtctgaatgacctgtcacgggataatccgaagtggtcagactggaaaatcagagggcaggaactgctgaacagcaaaaagtcagatagcaccacatagcagacccgccataaaacgccctgagaagcccgtgacgggcttttcttgtattatgggtagtttccttgcatgaatccataaaaggcgcctgtagtgccatttacccccattcactgccagagccgtgagcgcagcgaactgaatgtcacgaaaaagacagcgactcaggtgcctgatggtcggagacaaaaggaatattcagcgatttgcccgagcttgcgagggtgctacttaagcctttagggttttaaggtctgttttgtagaggagcaaacagcgtttgcgacatccttttgtaatactgcggaactgactaaagtagtgagttatacacagggctgggatctattctttttatctttttttattctttctttattctataaattataaccacttgaatataaacaaaaaaaacacacaaaggtctagcggaatttacagagggtctagcagaatttacaagttttccagcaaaggtctagcagaatttacagatacccacaactcaaaggaaaaggactagtaattatcattgactagcccatctcaattggtatagtgattaaaatcacctagaccaattgagatgtatgtctgaattagttgttttcaaagcaaatgaactagcgattagtcgctatgacttaacggagcatgaaaccaagctaattttatgctgtgtggcactactcaaccccacgattgaaaaccctacaaggaaagaacggacggtatcgttcacttataaccaatacgctcagatgatgaacatcagtagggaaaatgcttatggtgtattagctaaagcaaccagagagctgatgacgagaactgtggaaatcaggaatcctttggttaaaggcttttggattttccagtggacaaactatgccaagttctcaagcgaaaaattagaattagtttttagtgaagagatattgccttatcttttccagttaaaaaaattcataaaatataatctggaacatgttaagtcttttgaaaacaaatactctatgaggatttatgagtggttattaaaagaactaacacaaaagaaaactcacaaggcaaatatagagattagccttgatgaatttaagttcatgttaatgcttgaaaataactaccatgagtttaaaaggcttaaccaatgggttttgaaaccaataagtaaagatttaaacacttacagcaatatgaaattggtggttgataagcgaggccgcccgactgatacgttgattttccaagttgaactagatagacaaatggatctcgtaaccgaacttgagaacaaccagataaaaatgaatggtgacaaaataccaacaaccattacatcagattcctacctacataacggactaagaaaaacactacacgatgctttaactgcaaaaattcagctcaccagttttgaggcaaaatttttgagtgacatgcaaagtaagtatgatctcaatggttcgttctcatggctcacgcaaaaacaacgaaccacactagagaacatactggctaaatacggaaggatctgaggttcttatggctcttgtatctatcagtgaagcatcaagactaacaaacaaaagtagaacaactgttcaccgttacatatcaaagggaaaactgtccatatgcacagatgaaaacggtgtaaaaaagatagatacatcagagcttttacgagtttttggtgcattcaaagctgttcaccatgaacagatcgacaatgtaacagatgaacagcatgtaacacctaatagaacaggtgaaaccagtaaaacaaagcaactagaacatgaaattgaacacctgagacaacttgttacagctcaacagtcacacatagacagcctgaaacaggcgatgctgcttatcgaatcaaagctgccgacaacacgggagccagtgacgcctcccgtggggaaaaaatcatggcaattctggaagaaatagcgctttcagccggcaaaccggctgaagccggatctgcgattctgataacaaactagcaacaccagaacagcccgtttgcgggcagcaaaacccgtaccgattatcaaaaaggatcttcacctagatccttttaaattaaaaatgaagttttaaatcaatctaaagtatatatgagtaaacttggtctgacagttaccaatgcttaatcagtgaggcacctatctcagcgatctgtctatttcgttcatccatagttgcctgactccccgtcgtgtagataactacgatacgggagggcttaccatctggccccagtgctgcaatgataccgcgagaaccacgctcaccggctccagatttatcagcaataaaccagccagccggaagggccgagcgcagaagtggtcctgcaactttatccgcctccatccagtctattaattgttgccgggaagctagagtaagtagttcgccagttaatagtttgcgcaacgttgttgccattgctacaggcatcgtggtgtcacgctcgtcgtttggtatggcttcattcagctccggttcccaacgatcaaggcgagttacatgatcccccatgttgtgcaaaaaagcggttagctccttcggtcctccgatcgttgtcagaagtaagttggccgcagtgttatcactcatggttatggcagcactgcataattctcttactgtcatgccatccgtaagatgcttttctgtgactggtgagtactcaaccaagtcattctgagaatagtgtatgcggcgaccgagttgctcttgcccggcgtcaatacgggataataccgcgccacatagcagaactttaaaagtgctcatcattggaaaacgttcttcggggcgaaaactctcaaggatcttaccgctgttgagatccagttcgatataacccactcgtgcacccaactgatcttcagcatcttttactttcaccagcgtttctgggtgagcaaaaacaggaaggcaaaatgccgcaaaaaagggaataagggcgacacggaaatgttgaatactcatactcttcctttttcaatattattgaagcatttatcagggttattgtctcatgagcggatacatatttgaatgtatttagaaaaataaacaaataggggttccgcgcacatttccccgaaaag

SEQ ID NO: 79 - DNA, 7222 bp, Artificial Sequence
  Synthetic
cgattatcaaaaaggatcttcacctagatccttttaaattaaaaatgaagttttaaatcaatctaaagtatatatgagtaaacttggtctgacagttatcagaagaactcgtcaagaaggcgatagaaggcgatgcgctgcgaatcgggagcggcgataccgtaaagcacgaggaagcggtcagcccattcgccgccaagctcttcagcaatatcacgggtagccaacgctatgtcctgatagcggtccgccacacccagccggccacagtcgatgaatccagaaaagcggccattttccaccatgatattcggcaagcaggcatcgccatgggtcacgacgagatcctcgccgtcgggcatgcgcgccttgagcctggcgaacagttcggctggcgcgagcccctgatgctcttcgtccagatcatcctgatcgacaagaccggcttccatccgagtacgtgctcgctcgatgcgatgtttcgcttggtggtcgaatgggcaggtagccggatcaagcgtatgcagccgccgcattgcatcagccatgatggatactttctcggcaggagcaaggtgagatgacaggagatcctgccccggcacttcgcccaatagcagccagtcccttcccgcttcagtgacaacgtcgagcacagctgcgcaaggaacgcccgtcgtggccagccacgatagccgcgctgcctcgtcctgcagttcattcagggcaccggacaggtcggtcttgacaaaaagaaccgggcgcccctgcgctgacagccggaacacggcggcatcagagcagccgattgtctgttgtgcccagtcatagccgaatagcctctccacccaagcggccggagaacctgcgtgcaatccatcttgttcaatcatgcgaaacgatcctcaatattattgaagcatttatcagggttattgtctcatgagcggatacatatttgaatgtatttagaaaaataaacaaataggggttccgcgcacatttccccgaaaagtgccacctgacgtctaagaaaccattattatcatgacattaacctataaaaataggcgtatcacgaggcagaatttcagataaaaaaaatccttagctttcgctaaggatgatttctggaattcgcggccgcttctagagggaggcgcggataaaaatttcatttgcccgcgacggattccccgcccatctatcgttgaacccatcagctgcgttcatcagcgaagctgtcaccggatgtgctttccggtctgatgagtccgtgaggacgaaacagcctctacaaataattttgtttaatacttcacacaggaaagtactagatgagcaaaggagaagaacttttcactggagttgtcccaattcttgttgaattagatggtgatgttaatgggcacaaattttctgtccgtggagagggtgaaggtgatgctacaaacggaaaactcacccttaaatttatttgcactactggaaaactacctgttccgtggccaacacttgtcactactctgacctatggtgttcaatgcttttcccgttatccggatcacatgaaacggcatgactttttcaagagtgccatgcccgaaggttatgtacaggaacgcactatatctttcaaagatgacgggacctacaagacgcgtgctgaagtcaagtttgaaggtgatacccttgttaatcgtatcgagttaaagggtattgattttaaagaagatggaaacattcttggacacaaactcgagtacaactttaactcacacaatgtatacatcacggcagacaaacaaaagaatggaatcaaagctaacttcaaaattcgccacaacgttgaagatggttccgttcaactagcagaccattatcaacaaaatactccaattggcgatggccctgtccttttaccagacaaccattacctgtcgacacaatctgtcctttcgaaagatcccaacgaaaagcgtgaccacatggtccttcttgagtttgtaactgctgctgggattacacatggcatggatgagctctacaaaggaggtgagaaaaaaatcactggatataccaccgttgatatatcccaatggcatcgtaaagaacattttgaggcatttcagtcagttgctcaatgtacctataaccagaccgttcagctggatattacggcctttttaaagaccgtaaagaaaaataagcacaagttttatccggcctttattcacattcttgcccgcctgatgaatgctcatccggaatttcgtatggcaatgaaagacggtgagctggtgatatgggatagtgttcacccttgttacaccgttttccatgagcaaactgaaacgttttcatcgctctggagtgaataccacgacgatttccggcagtttctacacatatattcgcaagatgtggcgtgttacggtgaaaacctggcctatttccctaaagggtttattgagaatatgtttttcgtctcagccaatccctgggtgagtttcaccagttttgatttaaacgtggccaatatggacaacttcttcgcccccgttttcaccatgggcaaatattatacgcaaggcgacaaggtgctgatgccgctggcgattcaggttcatcatgccgtttgtgatggcttccatgtcggcagaatgcttaatgaattacaacagtactgcgatgagtggcagggcggggcgtaaaatggcgttaataaataaggaggtaaggtaatatggcgagctatccgtgtcaccagcatgcatctgctttcgatcaggcagcgcgcagccgtggtcattctaatcgtcgtaccgcactgcgtccgcgtcgtcagcaggaggccactgaggttcgtctggagcaaaagatgccgaccctgttacgcgtatacattgatgggccgcatggtatgggtaaaaccaccacgacccaattactggttgcgctgggcagccgtgatgatattgtttatgtgcctgaaccgatgacgtattggcaggtgctgggcgcgagtgaaactattgctaatatctatacgacccagcatcgtctggaccaaggggaaatcagcgccggtgatgcagccgtagtgatgaccagtgcgcaaatcacgatgggtatgccttacgcagtaaccgatgcggttctggcgccgcatattggtggtgaagccggcagtagccatgcgccgccgcctgccctgaccctgatttttgatcgtcacccgattgcggctctgctgtgctatcctgctgcacgttatctgatgggttctatgaccccacaggccgtcctggcattcgttgcactgattccgcctactctgcctgggaccaatatcgtgctgggggcgctgccagaagatcgtcatatcgaccgtctggcgaaacgtcaacgtcctggtgaacgcctggatctggcgatgctggcagcgattcgtcgtgtatatggcctgctggcgaacactgtccgttacctgcaaggcggtggcagttggcgtgaagattggggtcaactgagcggtacggcagttcctccgcagggtgcggaacctcagtctaacgcaggtccgcgtccgcacattggtgataccctgttcaccctgttccgtgcgccggagctgctggcaccaaatggggatctgtacaatgttttcgcgtgggcgctggatgttctggctaagcgtctgcgcccgatgcatgtttttattctggattatgatcaaagcccagcaggctgtcgtgatgcgctgcttcaactgactagcggcatggtgcaaacgcatgtgacgacgcctgggagtatcccgaccatctgtgatcttgcccgtaccttcgcacgtgaaatgggtgaagcgaatgccgaagctgcagcaaaggaggccgcagctaaagcggctgcagcgaaagcggtgtctaaaggcgaagccgttattaaagaattcatgcgcttcaaggttcacatggagggctcgatgaatggtcatgagttcgagattgaaggggaaggtgagggccgaccatatgagggcacccaaactgcaaaactgaaggttactaaaggtggtccgctcccgtttagttgggatattctgagcccgcagttcatgtacggctcacgcgcttttattaagcatccggcggacataccggactactataaacagtccttcccggaagggtttaaatgggaaagagtgatgaactttgaggacggaggtgcggttacagtgactcaggataccagtctggaggatggtacgctgatctataaagtaaaactgcgtggtaccaattttcccccagatggccccgtaatgcagaaaaaaaccatggggtgggaagcatcgaccgaacgcctttacccggaagatggcgtcttgaaaggagacatcaaaatggctttgcgcttaaaagatggcggccgttatctggcggattttaaaacgacctacaaagccaagaaacctgtccaaatgcctggtgcctacaacgtggatcgtaaactagacatcacgtcccataacgaagattatacagtggtcgaacagtatgaacggagcgaaggccgtcacagcacggggggaatggacgaattatataagtaacattactcgcatccattctcaggctctcggtaccaaattccagaaaagaggcctcccgaaaggggggccttttttcgttttggtcctactggcgcgcctttacggctagctcagtcctaggtactatgctagcaaggtagactgtcgccggatgtgtatccgacctgacgatggcccaaaagggccgaaacagtcctctacaaataattttgtttaatacttcatggacgaaagtactagatgaatgaaaccgatcctgatctggaactgctgaaacgtattggtaataatgatgcacaggccgttaaagaaatggttacccgtaaactgcctcgtctgctggcactggcaagtcgcctgctgggtgatgcagatgaagcacgtgatattgcacaagaaagttttctgcgcatttggaaacaggcagcaagctggcgtagcgaacaggcacgttttgatacctggctgcatcgtgttgcactgaatctgtgttatgatcgtctgcgtcgtcgtaaagaacatgtgccggttgatagcgaacatgcctgtgaagcatgcctgagctacgaaaccgaaatcctgaccgttgaatatggtctgctgccgatcggcaaaatcgtagaaaagcgtatcgaatgtacggtttactctgtcgataacaacggtaacatctacacccagccggtagcgcagtggcacgaccgtggcgaacaagaagtgttcgagtactgcctggaggatggctctctgatccgcgctactaaagaccacaaatttatgaccgtggacggtcaaatgctgccgatcgatgaaatctttgagcgcgaactggacctgatgcgcgtggacaacctgccgaacatcaaaattgctacccgcaagtatctgggtaagcagaacgtctatgacattggtgtggagcgcgaccacaatttcgctctgaaaaacggaggatctggtggaagtggtggttctggaggtcgttttccgaatattaccaacttatgcccgtttggtgaggtgttcaacgcgacccgctttgccagcgtatacgcgtggaatcgtaaacgtatctcgaactgcgtagcggattactccgtgctttacaactcagcttccttctccacctttaaatgttatggtgtttcaccgaccaagttaaacgatctgtgctttacgaacgtctatgccgattcatttgtgatcagaggtgatgaggttcgtcaaattgcgcctggacagacaggcaaaattgcagactataactacaaacttcccgacgattttacgggctgtgttattgcgtggaattcgaacaacctggatagtaaggttggagggaattataactatctgtaccgcctgtttcgtaaatctaacctgaaacctttcgaacgcgacatatcaactgaaatctatcaggcaggtagcactccctgtaacggtgtcgagggatttaactgctattttcctctgcagagttatggctttcagcctacgaatggagtaggctatcaaccgtaccgggtggtggttcttagtttcgagctgctgcatgcaccagccacagtatgtggccccaaaaagtcaacgaatctttaactcggtaccaaattccagaaaagagacgctttcgagcgtcttttttcgttttggtcccgcttactagtagcggccgctgcagtccggcaaaaaagggcaaggtgtcaccaccctgccctttttctttaaaaccgaaaagattacttcgcgttatgcaggcttcctcgctcactgactcgctgcgctcggtcgttcggctgcggcgagcggtatcagctcactcaaaggcggtaattcatgaccaaaatcccttaacgtgagttttcgttccactgagcgtcagaccccgtagaaaagatcaaaggatcttcttgagatcctttttttctgcgcgtaatctgctgcttgcaaacaaaaaaaccaccgctaccaacggtggtttgtttgccggatcaagagctaccaactctttttccgaaggtaactggcttcagcagagcgcagataccaaatactgtccttctagtgtagccgtagttaggccaccacttcaagaactctgtagcaccgcctacatacctcgctctgctaatcctgttaccagtggctgctgccagtggcgataagtcgtgtcttaccgggttggactcaagacgatagttaccggataaggcgcagcggtcgggctgaacggggggttcgtgcacacagcccagcttggagcgaacgacctacaccgaactgagatacctacagcgtgagctatgagaaagcgccacgcttcccgaagggagaaaggcggacaggtatccggtaagcggcagggtcggaacaggagagcgcacgagggagcttccagggggaaacgcctggtatctttatagtcctgtcgggtttcgccacctctgacttgagcgtcgatttttgtgatgctcgtcaggggggcggagcctatggaaaaacgccagcaacgcggcctttttacggttcctggccttttgctggccttttgctcacatgttctttcctgcgttatcccctgattctgtggataaccgt

SEQ ID NO: 80 - protein, 775 aa, Artificial Sequence
  Synthetic
MQSTPLLQIQPHFHVEVIEPKQVYLLGEQANHALTGQLYCQILPLLNGQYTLEQIVEKLDGEVPPEYIDYVLERLAEKGYLTEAAPELSSEVAAFWSELGIAPPVAAEALRQPVTLTPVGNISEVTVAALTTALRDIGISVQTPTEAGSPTALNVVLTDDYLQPELAKINKQALESQQTWLLVKPVGSVLWLGPVFVPGKTGCWDCLAHRLRGNREVEASVLRQKQAQQQRNGQSGSVIGCLPTARATLPSTLQTGLQFAATEIAKWIVKYHVNATAPGTVFFPTLDGKIITLNHSILDLKSHILIKRSQCPTCGDPKILQHRGFEPLKLESRPKQFTSDGGHRGTTPEQTVQKYQHLISPVTGVVTELVRITDPANPLVHTYRAGHSFGSATSLRGLRNTLKHKSSGKGKTDSQSKASGLCEAVERYSGIFQGDEPRKRATLAELGDLAIHPEQCLCFSDGQYANRETLNEQATVAHDWIPQRFDASQAIEWTPVWSLTEQTHKYLPTALCYYHYPLPPEHRFARGDSNGNAAGNTLEEAILQGFMELVERDGVALWWYNRLRRPAVDLGSFNEPYFVQLQQFYRENDRDLWVLDLTADLGIPAFAGVSNRKTGSSERLILGFGAHLDPTIAILRAVTEVNQIGLELDKVPDENLKSDATDWLITEKLADHPYLLPDTTQPLKTAQDYPKRWSDDIYTDVMTCVNIAQQAGLETLVIDQTRPDIGLNVVKVTVPGMRHFWSRFGEGRLYDVPVKLGWLDEPLTEAQMNPTPMPF

SEQ ID NO: 81 - protein, 467 aa, Artificial Sequence
  Synthetic
MANLIQDREDELIHFHPYKLFEVDSKTFFYNVVTNAIFEIDSLIIDILHSKGKNEEHVVKDLAERYELSQVREAIQNMKEAYIIATDANISDVEKMGILDNSQRVFKLSSLTLFMVQECNLRCTYCYGEEGEYNQKGKMTSEIARSAVDFLIQQSGEIEQLNITFFGGEPLLNFPLIQETVQYVHEQSEIHNKKFSFSITTNGTLITPKIKNFFYKHHFAVQTSIDGDEKTHNFNRFFKGGQGSYDLLLKRTEEMRNDRKIGARGTVTPAELDLSKSFDHLVKLGFRKIYLSPALYSLSDDHYDTLSKEMVKLVEQFRELLEREDYVTAKKMSNVLGMLSKIHSGGPRIHFCGAGTNAAAVDVRGNLFPCHRFVGEDECSIGNLFDEDPLSKQYNFIENSTVRNRTTCSKCWAKNLCGGGCHQENFAENGNVNQPVGKLCKVTKNFINATINLYLQLTQEQRSILFG

SEQ ID NO: 82 - protein, 1068 aa, Artificial Sequence
  Synthetic
MESPSSWKTSWLAAIAPDEPHKFDRRLEWDELSEENFFAALNSEPASLEEDDPCFEEALQDALEALKAAWDLPLLPVDNNLNRPFVDVWWPIRCHSAESLRQSFVSDSAGLADEIFDQLADSLLDRLCALGDQVLWEAFNKERTPGTMLLAHLGAAGDGSGPPVREHYERFIQSHRRNGLAPLLKEFPVLGRLIGTVLSLWFQGSVEMLQRICADRTVLQQCFAIPCGHHLKTVKQGLSDPHRGGRAVAVLEFADPNSTANSSMHVVYKPKDMAVDAAYQATLADLNTHSDLSPLRTLAIHNGNGYGYMEHVVHHLCANDKELTNFYFNAGRLTALLHLLGCTDCHHENLIACGDQLLLIDTETLLEADLPDHISDASSTTAQPKPSSLQKQFQRSVLRSGLLPQWMFLGESKLAIDISALGMSPPNKPERIALGWLGFNSDGMMPGRVSQPVEIPTSLPVGIGEVNPFDRFLEDFCDGFSMQSEALIKLRNRWLDVNGVLAHFAGLPRRIVLRATRVYFTIQRQQLEPTALRSPLAQALKLEQLTRSFLLAESKPLHWPIFAAEVKQMQHLDIPFFTHLIDADALQLGGLEQELPGFIQTSGLAAAYERLRNLDTDEIAFQLRLIRGAVEARELHTTPESSPTLPPPATPEALMSSSAETSLEAAKRIAHRLLELAIRDSQGQVEWLGMDLGADGESFSFGPVGLSLYGGSIGIAHLLQRLQAQQVSLMDADAIQTAILQPLVGLVDQPSDDGRRRWWRDQPLGLSGCGGTLLALTLQGEQAMANSLLAAALPRFIEADQQLDLIGGCAGLIGSLVQLGTESALQLALRAGDHLIAQQNEEGAWSSSSSQPGLLGFSHGTAGYAAALAHLHAFSADERYRTAAAAALAYERARFNKDAGNWPDYRSIGRDSDSDEPSFMASWCHGAPGIALGRACLWGTALWDEECTKEIGIGLQTTAAVSSVSTDHLCCGSLGLMVLLEMLSAGPWPIDNQLRSHCQDVAFQYRLQALQRCSAEPIKLRCFGTKEGLLVLPGFFTGLSGMGLALLEDDPSRAVVSQLISAGLWPTE

SEQ ID NO: 83 - protein, 308 aa, Artificial Sequence
  Synthetic
MKTILIITNTLDLTVDYIINRYNHTAKFFRLNTDRFFDYDINITNSGTSIRNRKSNLIINIQEIHSLYYRKITLPNLDGYESKYWTLMQREMMSIVEGIAETAGNFALTRPSVLRKADNKIVQMKLAEEIGFILPQSLITNSNQAAASFCNKNNTSIVKPLSTGRILGKNKIGIIQTNLVETHENIQGLELSPAYFQDYIPKDTEIRLTIVGNKLFGANIKSTNQVDWRKNDALLEYKPANIPDKIAKMCLEMMEKLEINFAAFDFIIRNGDYIFLELNANGQWLWLEDILKFDISNTIINYLLGEPI

SEQ ID NO: 84 - protein, 9 aa, Artificial Sequence
  Synthetic
LAELSEEAL

SEQ ID NO: 85 - protein, 11 aa, Artificial Sequence
  Synthetic
LNEEELEAIAG

SEQ ID NO: 86 - protein, 8 aa, Artificial Sequence
  Synthetic
SQRISAIT

SEQ ID NO: 87 - protein, 7 aa, Artificial Sequence
  Synthetic
PYIAKYV

SEQ ID NO: 88 - protein, 42 aa, Artificial Sequence
  Synthetic
  MOD_RES (5)..(5): Xaa may be G or E
  MOD_RES (7)..(7): Xaa may be W or T
  MOD_RES (8)..(8): Xaa may be F or I
  MOD_RES (9)..(9): Xaa may be F or I
  MOD_RES (10)..(10): Xaa may be A or I
  MOD_RES (11)..(11): Xaa may be T or I
  MOD_RES (12)..(12): Xaa may be Q or L
  MOD_RES (13)..(13): Xaa may be S or L
  MOD_RES (14)..(14): Xaa may be T, V, or G
  MOD_RES (15)..(15): Xaa may be L, Y, or S
  MOD_RES (16)..(16): Xaa may be A, M, R, or G
  MOD_RES (18)..(18): Xaa may be R, G, N, W, or K
  MOD_RES (22)..(22): Xaa may be W, M, V, L or F
  MOD_RES (23)..(23): Xaa may be F, H, C, P, or K
  MOD_RES (25)..(25): Xaa may be G, L, W, V, or I
  MOD_RES (38)..(38): Xaa may be L, F, or A
GTFSXGXXXXXXXXXXGXDGVXXTXSHECHMNTWQFLXTCCS

SEQ ID NO: 89 - protein, 33 aa, Artificial Sequence
  Synthetic
GGWFTAIQLTLAGRCGNWFTGSFECTSNNVKCG

SEQ ID NO: 90 - protein, 25 aa, Artificial Sequence
  Synthetic
GGDGVMHTLTHECHMNTWQFLLTCC

SEQ ID NO: 91 - protein, 37 aa, Artificial Sequence
  Synthetic
GTFSEGTISITLSVYMGNDGKVCTWTVECQNNCSHKK

SEQ ID NO: 92 - protein, 28 aa, Artificial Sequence
  Synthetic
GSRWWQGVLPTVSHECRMNSFQHIFTCC

SEQ ID NO: 93 - protein, 27 aa, Artificial Sequence
  Synthetic
GGKNGVFKTISHECHLNTWAFLATCCS

SEQ ID NO: 94 - protein, 34 aa, Artificial Sequence
  Synthetic
  MOD_RES (5)..(5): Xaa may be F, Y, or Q
  MOD_RES (9)..(9): Xaa may be Q, K, or R
  MOD_RES (18)..(18): Xaa may be N, L, or G
  MOD_RES (19)..(19): Xaa may be W, C, or V
  MOD_RES (22)..(22): Xaa may be G, C, or L
  MOD_RES (32)..(32): Xaa may be K, H, or S
GGGWXTAFXLTLAGRCGXXFTXSYECTSNNVXCG

SEQ ID NO: 95 - protein, 29 aa, Artificial Sequence
  Synthetic
  MOD_RES (3)..(3): Xaa may be I, F, L, or Y
  MOD_RES (5)..(5): Xaa may be G, W, or K
  MOD_RES (6)..(6): Xaa may be D, Q, or N
  MOD_RES (9)..(9): Xaa may be  M, L, or F
  MOD_RES (10)..(10): Xaa may be H, P, or K
  MOD_RES (12)..(12): Xaa may be L, V, or I
  MOD_RES (25)..(25): Xaa may be L, F, or A
GSXGXXGVXXTXSHECHMNTWQFLXTCCS

SEQ ID NO: 96 - protein, 32 aa, Artificial Sequence
  Synthetic
GWQTAFRLTMQGRCGGVFTLSYECATPHVSCG

SEQ ID NO: 97 - protein, 51 aa, Artificial Sequence
  Synthetic
IDTLDYEISHQELSGKSAAGWQTAFRLTMQGRCGGVFTLSYECATPHVSCG

SEQ ID NO: 98 - protein, 32 aa, Artificial Sequence
  Synthetic
GGWYTAFKLTLAGRCGLCFTCSYECTSNNVHC

SEQ ID NO: 99 - protein, 32 aa, Artificial Sequence
  Synthetic
GWFTAIQLTLAGRCGNWFTGSFECTSNNVKCG

SEQ ID NO: 100 - protein, 34 aa, Artificial Sequence
  Synthetic
GGGWFTAIQLTLAGRCGNWFTGSFECTSNNVKCG

SEQ ID NO: 101 - protein, 34 aa, Artificial Sequence
  Synthetic
GGGWYTAFKLTLAGRCCGLCFTCSYECTSNNVHC

SEQ ID NO: 102 - protein, 42 aa, Artificial Sequence
  Synthetic
  MOD_RES (3)..(3): Xaa may be I, F, L, or Y
  MOD_RES (10)..(10): Xaa may be V or I
  MOD_RES (19)..(19): Xaa may be P, S, T, or K
  MOD_RES (20)..(20): Xaa may be P, G, N, or R
  MOD_RES (24)..(24): Xaa may be L, G, A, or R
  MOD_RES (27)..(27): Xaa may be V, F, or S
  MOD_RES (28)..(28): Xaa may be P, T, or S
  MOD_RES (29)..(29): Xaa may be P, G, or E
  MOD_RES (30)..(30): Xaa may be G or W
  MOD_RES (31)..(31): Xaa may be G or R
  MOD_RES (32)..(32): Xaa may be V or L
  MOD_RES (33)..(33): Xaa may be S or V
  MOD_RES (34)..(34): Xaa may be G or P
  MOD_RES (35)..(35): Xaa may be G or R
GWXWGSYRDXYGALRGPNXXFVGXGGXXXXXXXXXSWRLVPR

SEQ ID NO: 103 - protein, 29 aa, Artificial Sequence
  Synthetic
GLIYGKYRDVLSGARLVTPPEVALRLVPR

SEQ ID NO: 104 - protein, 42 aa, Artificial Sequence
  Synthetic
GWFWGSYRDIFGALRGPNSGFEGGGGFTGGGVSGGSWRLVPR

SEQ ID NO: 105 - protein, 35 aa, Artificial Sequence
  Synthetic
GWLWGSYRDVYGVWHGPRTNFNGAGGSSEWRLVPR

SEQ ID NO: 106 - protein, 24 aa, Artificial Sequence
  Synthetic
GWYWGNRRDIYGALRYANKRLVPR

SEQ ID NO: 107 - protein, 33 aa, Artificial Sequence
  Synthetic
  MOD_RES (5)..(6): Xaa may be dehydrobutyrine
  MOD_RES (15)..(15): Xaa may be dehydrobutyrine
  MOD_RES (24)..(24): Xaa may be dehydroalanine
  MOD_RES (27)..(27): Xaa may be dehydrobutyrine
GVGYXXYWGILPLVXKNPQIAPVXENXVKARLL

SEQ ID NO: 108 - protein, 11 aa, Artificial Sequence
  Synthetic
YRPYIAKYVEE

SEQ ID NO: 109 - protein, 7 aa, Artificial Sequence
  Synthetic
PFFARFL

SEQ ID NO: 110 - protein, 9 aa, Artificial Sequence
  Synthetic
LAELSEEAL

SEQ ID NO: 111 - protein, 6 aa, Artificial Sequence
  Synthetic
ENLYFQ

SEQ ID NO: 112 - protein, 10 aa, Artificial Sequence
  Synthetic
  misc_feature (1)..(5): Xaa can be any naturally occurring amino acid
  misc_feature (7)..(10): Xaa can be any naturally occurring amino acid
XXXXXCXXXX

SEQ ID NO: 113 - protein, 24 aa, Artificial Sequence
  Synthetic
GSSRGGKGGPGGRGGVGGGGGIGG

SEQ ID NO: 114 - protein, 13 aa, Artificial Sequence
  Synthetic
  misc_feature (1)..(1): Xaa can be any naturally occurring amino acid
  misc_feature (3)..(6): Xaa can be any naturally occurring amino acid
  MOD_RES (7)..(7): Xaa may be D or E
  misc_feature (9)..(12): Xaa can be any naturally occurring amino acid
  MOD_RES (13)..(13): Xaa may be D or E
XCXXXXXCXXXXX

SEQ ID NO: 115 - protein, 38 aa, Streptococcus pneumoniae
GTDGADPRSTIICSATLSFIASYLGSAQTRCGKDNKKK

SEQ ID NO: 116 - protein, 52 aa, Unknown
  Streptococcus_sp._M334
GIDTLDYEISHQELSGKSAAGWQTAFRLTMQGRCGGVFTLSYECATPHVSCG

SEQ ID NO: 117 - protein, 33 aa, Unknown
  Streptococcus_sp._M334
GGGWYTAFKLTLAGRCGLCFTCSYECTSNNVHC

SEQ ID NO: 118 - protein, 33 aa, Unknown; identical to SEQ ID NO: 89
  Streptococcus_sp._M334

SEQ ID NO: 119 - protein, 30 aa, Rothia dentocariosa
GTAFPGWYSKVIGNRGRVCTVTVECMSVCQ

SEQ ID NO: 120 - protein, 33 aa, Ruminococcus flavefaciens
GVGYTTYWGILPLVTKNPQICPVSENTVKCRLL

SEQ ID NO: 121 - protein, 39 aa, Ruminococcus flavefaciens
GASTLPCAEVVVTVTGIIVKATTGFDWCPTGACTHSCRF

SEQ ID NO: 122 - protein, 19 aa, Clostridium spp.
GEAVSYTLNCTHFLTILCC

SEQ ID NO: 123 - protein, 24 aa, Corynebacterium matruchotii
GTHPSTLIPISIALCPTTRCSRRC

SEQ ID NO: 124 - protein, 25 aa, Gardnerella vaginalis
GGDGVMHTLTHECHMNTWQFLLTCC

SEQ ID NO: 125 - protein, 37 aa, Rothia dentocariosa
GGHGGGYSGGGYSGGGNSGGGNYCGNGCGNYNFGFGF

SEQ ID NO: 126 - protein, 37 aa, Clostridium botulinum; identical to SEQ ID NO: 91

SEQ ID NO: 127 - protein, 35 aa, Myroides odoratimimus
GGGNSSKLYGSKGASCTCGNGVTCGTQQTKSGFEE

SEQ ID NO: 128 - protein, 28 aa, Lactobacillus iners
GSRWWQGVLPTVSHECRMNSFQHIFTCC

SEQ ID NO: 129 - protein, 27 aa, Streptococcus pyogenes
GGKNGVFKTISHECHLNTWAFLATCCS

SEQ ID NO: 130 - protein, 25 aa, Streptococcus pyogenes
GRGHGVNTISAECRWNSLQAIFTCC

SEQ ID NO: 131 - protein, 35 aa, Mobiluncus mulieris
GTSIPCGTLIIATLTQCFNDTLVWGSCRLGTRACC

SEQ ID NO: 132 - protein, 23 aa, Streptococcus pneumoniae
GMRFSTFSTNRCGNWSAFSWENC

SEQ ID NO: 133 - protein, 38 aa, Lactobacillus delbrueckii
GGGAGLEDSKSFSLICIGSRVGDGNHSSHKKHHKGKKH

SEQ ID NO: 134 - protein, 32 aa, Streptococcus agalactiae
GVTSKSLCTPGCKTGILMTCAIKTATCGCHFG

SEQ ID NO: 135 - protein, 16 aa, Staphylococcus caprae
GNTSLIWCTPGCAKNL

SEQ ID NO: 136 - protein, 31 aa, Myroides odoratimimus
GHVELMNADKVKCKSTSTTKSCSSTSTTSVD

SEQ ID NO: 137 - protein, 24 aa, Streptococcus sanguinis
GVGSRYLCTPGSCWKWVCFTTTVK

SEQ ID NO: 138 - protein, 25 aa, Streptococcus agalactiae
GAGHGVNTISAECRWNSLQAIFSCC

SEQ ID NO: 139 - protein, 27 aa, Streptococcus agalactiae
GGKNGVFKTISHECHLNTWAFLATCCS

SEQ ID NO: 140 - protein, 23 aa, Eubacterium sp.
GNMVIRARWTITSKCPSSIGHCC

SEQ ID NO: 141 - protein, 34 aa, Dolosigranulum pigrum
GTANTYCRCYSGRHSCGRACTITAECPVFTVACC

SEQ ID NO: 142 - protein, 32 aa, Unknown; identical to SEQ ID NO: 96
  Streptococcus_sp._M334

SEQ ID NO: 143 - protein, 29 aa, Rothia aeria
GLIYGKYRDVLSGARLVTPPEVALRLVPR

SEQ ID NO: 144 - protein, 28 aa, Enterococcus faecalis
GLWTGKFRDVFGGRALFQVVIYYRLVPR

SEQ ID NO: 145 - protein, 29 aa, Sphingobium yanoikuyae
GTSYGESLDATFPDGTPRGELTFSRLVPR

SEQ ID NO: 146 - protein, 35 aa, Rothia aeria; identical to SEQ ID NO: 105

SEQ ID NO: 147 - protein, 24 aa, Rothia aeria
GWYWGNRRDIYGALRYANKRLVPR

SEQ ID NO: 148 - protein, 18 aa, Unknown
  Caulobacter sp. K31
SIGDSGLRESMSSQTYWP

SEQ ID NO: 149 - protein, 19 aa, Unknown
  Caulobacter sp. K31
AGTGVLLPETNQIKRYDPA

SEQ ID NO: 150 - protein, 21 aa, Unknown
  Caulobacter sp. K31
GDVLNAPEPGIGREPTGLSRD

SEQ ID NO: 151 - protein, 23 aa, Paenibacillus dendritiformis
AGPGTSTPDAFQPDPDEDVHYDS

SEQ ID NO: 152 - protein, 22 aa, Thermobacillus composti
AGPGKAKPDAVQPDEDEIVHYS

SEQ ID NO: 153 - protein, 16 aa, Lentzea kentuckyensis
GLRRLFADQLVGRRNI

SEQ ID NO: 154 - protein, 38 aa, Aeribacillus pallidus
GYSAAQCAWMALSCVNYIPGVGFGCGGYSACELYKRYC

SEQ ID NO: 155 - protein, 3 aa, Pantoea agglomerans
EEN

SEQ ID NO: 156 - protein, 21 aa, Xanthomonas oryzae
DYPPPGANPKHDPPPRNPGHH

SEQ ID NO: 157 - protein, 24 aa, Unknown
  Pleurocapsa sp. PCC7319
VDLSIFELLDEEPLFPIRPLGLPI

SEQ ID NO: 158 - protein, 22 aa, Unknown
  Pleurocapsa sp. PCC7319
AVAAMGVVFPWDNEFPWPRWGG

SEQ ID NO: 159 - protein, 22 aa, S. globisporus
ETCECVGLLTLLNTVCIGISCA

SEQ ID NO: 160 - protein, 30 aa, Lactococcus lactis
CSTNTFSLSDYWGNNGAWCTLTHECMAWCK

SEQ ID NO: 161 - protein, 16 aa, Prochlorococcus marinus
FFCVQGTANRFTINVC

SEQ ID NO: 162 - protein, 29 aa, Bacillus halodurans
GCAWYNISCRLGNKGAYCTLTVECMPSCN

SEQ ID NO: 163 - protein, 25 aa, Bacillus halodurans
GTTWPCATVGVSVALCPTTKCTSQC

SEQ ID NO: 164 - protein, 22 aa, Staphylococcus epidermidis
IASKFICTPGCAKTGSFNSYCC

SEQ ID NO: 165 - protein, 46 aa, Plesiocystis pacifica
KGGPYTTLAIGEEDPITTLAIGEEDPDPTTLALGEEDPTTLAIGEE

SEQ ID NO: 166 - protein, 14 aa, Microcystis aeruginosa
GGTFKYYPSDWEDY

SEQ ID NO: 167 - protein, 21 aa, Unknown
  Bacillus thuringiensis serovar huazhongensis BGSC 4BD
GPDTTIVTETIENADPDEYFL

SEQ ID NO: 168 - protein, 26 aa, Unknown
  Prochloron sp. 06037A
TLPVPTLCSYDGVDASTVPTLCSYDD

SEQ ID NO: 169 - protein, 26 aa, Unknown
  Lyngbya sp. PCC 8106
TLPVPTLCSYDGVDASTVPTLCSYDD

SEQ ID NO: 170 - protein, 26 aa, Unknown
  Lyngbya sp. PCC 8106
TLPVPTLCSYDGVDASTVPTLCSYDD

SEQ ID NO: 171 - protein, 35 aa, Bacillus subtilis
NKGCATCSIGAACLVDGPIPDFEIAGATGLFGLWG

SEQ ID NO: 172 - protein, 31 aa, Paenibacillus polymyxa
GCSANDACYFCDTRDNCKACDASDFCIKSDT

SEQ ID NO: 173 - protein, 51 aa, Artificial Sequence
  Synthetic
EAVKEKNDLFNLDVKVNAKESNDSGAEPRIASKFICTPGCAKTGSFNSYCC

SEQ ID NO: 174 - protein, 181 aa, Artificial Sequence
  Synthetic
MHGKLLICATASINVININHYIVELKQHFDEVNILFSPSSKNFINTDVLKLFCDNLYDEIKDPLLNHINIVENHEYILVLPASANTINKIANGICDNLLTTVCLTGYQKLFIFPNMNIRMWGNPFLQKNIDLLKSNDVKVYSPDMNKSFEISSGRYKNNITMPNIENVLNFVLNNEKRPLD

SEQ ID NO: 175 - protein, 39 aa, Artificial Sequence
  Synthetic
MDKRVRYEKPSLVKEGTFRKTTAGLRRLFADQLVGRRNI

SEQ ID NO: 176 - protein, 345 aa, Artificial Sequence
  Synthetic
MSIELTPSLADLVDPLPGHALRAAATLRLADLIAAGADTAPALAAAARIDADAIARLMRYLCSRGIFQAHEGRYALTEFSELLLDEDPSGLRKTLDQDSYGDRFDRAVAELVDVVRSGEPSYPRLYGSTVYDDLAADPALGEVFADVRGLHSAGYGEDVAAVAGWSSCLRVVDLGGGTGSVLLAVLERHPSLSGAVLDLPYVAPQAKKALQASAFAQRCEFIKGSFFDPLPPADRYLLCNVLFNWDDAQAGAILARCAQAGPVAGVVVAERLIDPDAEVELVAAQDLRLLAVCGGRQRGTAEFEALGAAHGLALTSVTLTASGMSLLRFDVCRAGSAGGEVVEKS

SEQ ID NO: 177 - protein, 66 aa, Artificial Sequence
  Synthetic
MNKKNILPQLGQPVIRLTAGQLSSQLAELSEEALGGVDASTLPVPTLCSYDGVDASTVPTLCSYDD

SEQ ID NO: 178 - protein, 50 aa, Artificial Sequence
  Synthetic
MNKKNILPQLGQPVIRLTAGQLSSQLAELSEEALGGVDASTVPTLCSYDD

SEQ ID NO: 179 - protein, 775 aa, Artificial Sequence; identical to SEQ ID NO: 80
  Synthetic

SEQ ID NO: 180 - protein, 373 aa, Artificial Sequence
  Synthetic
MSLTNVKPLIKESHHIILADDGDICIGEIPGVSQVINDPPSWVRPALAKMDGKRTVPRIFKELVSEGVQIESEHLEGLVAGLAERKLLQDNSFFSKVLSGEEVERYNRQILQFSLIDADNQHPFVYQERLKQSKVAIFGMGGWGTWCALQLAMSGIGTLRLIDGDDVELSNINRQVLYRTDDVGKNKVDAAKDTILAYNENVHVETFFEFASPDRARLEELVGDSTFIILAWAALGYYRKDTAEEIIHSIAKDKAIPVIELGGDPLEISVGPIYLNDGVHSGFDEVKNSVKDKYYDSNSDIRKFQEARLKHSFIDGDRKVNAWQSAPSLSIMAGIVTDQVVKTITGYDKPHLVGKKFILSLQDFRSREEEIFK

SEQ ID NO: 181 - protein, 30 aa, Artificial Sequence
  Synthetic
MIKFSTLSQRISAITEENAMYTKGQVIVLS

SEQ ID NO: 182 - protein, 42 aa, Artificial Sequence
  Synthetic
MKKQYSKPSLEVLDVHQTMAGPGTSTPDAFQPDPDEDVHYDS

SEQ ID NO: 183 - protein, 313 aa, Artificial Sequence
  Synthetic
MTERAAVRTDHYKAFGFRIESDFVLPELPPAGEREPLDNITVRRTDLQPLWNSSIHFYGNFAILDHGRTVMFRVPGAAIYAVQDASSILVSPFDQAEENWVRLFILGTCIGIILLQRKIMPLHGSAVAIDGKAYAIIGESGAGKSTLALHLVSKGYPLLSDDVIPVVMTQGSPWVVPSYPQQKLWVDTLKHMGMDNANYTPLYERKTKFAVPVGSNFHEEPLPLASIFELVPWDAATHIAPIQGMERFRVLFHHTYRNFLVQPLGLMEWHFKTLSSFVHQIGMYRLHRPMVGFSTLDLTSHILNITRQGENDQ

SEQ ID NO: 184 - protein, 61 aa, Artificial Sequence
  Synthetic
MKDLLKELMYEVDLEEMENLQGSGYSAAQCAWMALSCVNYIPGVGFGCGGYSACELYKRYC

SEQ ID NO: 185 - protein, 432 aa, Artificial Sequence
  Synthetic
MGNLRDFYQLMKDNYADSNLFKDLNLIHNISNDIQIGINCDFSEMLGELVGNYDSLNYPSITCGILTYNEERCIKRCLESVVNEFDEIIVLDSVSEDNTVKIIKENFNDVKVYVEPWKNDFSFHRNKIINLATCDWIYFIDADNYYDSKNKGKAMRIAKVMDFLKIEGVVSPTVIEHDNSMSRDTRKMFRLKDNILFSGKVHEEPVYANGEIPRNIIVDINVFHDGYNPKIINMMEKNERNITLTKEMMKIEPNNPKWLYFYSRELYQTQRDIALVQSVLFKALELYENSSYTRYYVDTIALLCRVLFESKNYQKLTECLNILENNTLNCSDIDYYNSALLFYNLLLRIKKISSTLKENIDMYERDYHSFINPSHDHIKILILNMLLLLGDYQDAFKVYKEIKSIEIKDEFLVNVNKFKDNLLSFIDSINKI

SEQ ID NO: 186 - protein, 98 aa, Artificial Sequence
  Synthetic
MSIESAKAFYQRMTDDASFRTPFEAELSKEERQQLIKDSGYDFTAEEWQQAMTEIQAARSNEELNEEELEAIAGGAVAAMYGVVFPWDNEFPWPRWGG

SEQ ID NO: 187 - protein, 419 aa, Artificial Sequence
  Synthetic
MTKKYRRVSYAVWEITLKCNLACSHCGSRAGQARTKELSTEEAFNLVRQLADVGIKEVTLIGGEAFMRSDWLEIAKAVTEAGMICGMTTGGFGVSLETARKMKEAGIKTVSVSIDGGIPETHDRQRGKKGAWHSAFRTMSHLKEVGIYFGCNTQINRLSASEFPIIYERIRDAGARAWQIQLTVPMGNAADNADMLLQPYELLDIYPMLARVAKRAKQEGVRIQAGNNIGYYGPYERLLRGSDEWTFWQGCGAGLNTLGIEADGKIKGCPSLPTAAYTGGNIRDRPLREIVEQTEELKFNLKAGTEQGTDHMWGFCKTCEFAELCRGGCSWTAHVFFDRRGNNPYCHHRALKQAQKDIRERFYLKVKAKGNPFDNGEFVIIEEPFNAPLPENDLLHFNSDHIQWPENWQNSESAYALAK

SEQ ID NO: 188 - protein, 56 aa, Artificial Sequence
  Synthetic
MNSNQIPNKVATAAQKSDDSSSVLPRQGWQDKQAFIKALIKAKQSLEIAEISNFLT

SEQ ID NO: 189 - protein, 64 aa, Artificial Sequence
  Synthetic
MYRPYIAKYVEEQTLQNSTNLVYDDITQISFINKEKNVKKINLGPDTTIVTETIENADPDEYFL

SEQ ID NO: 190 - protein, 308 aa, Artificial Sequence; identical to SEQ ID NO: 83
  Synthetic

SEQ ID NO: 191 - protein, 42 aa, Artificial Sequence
  Synthetic
MRKKEWQTPELEVLDVRLTAAGPGKAKPDAVQPDEDEIVHYS

SEQ ID NO: 192 - protein, 310 aa, Artificial Sequence
  Synthetic
MTRTNTGYRYRAFGLRIDSDIPLPELGDGTRPDGDADLTVVRCGEAEPEWAEGGGGGRLYAAEGIVSFRVPQTAAFRITNGNRIEVHAYSGADEDRIRLYVLGTCMGALLLQRRILPLHGSVVARDGRAYAIVGESGAGKSTMSAALLERGFRLVTDDVAAIVFDERGTPLVMPAYPQQKLWQDSLDRLQIAGSGLRPLFERETKYAVPADGAFWPEPVPLVHIYELVHSDGQTPELQPIAKLERCYTLYRHTFRRSLIVPSGLSAWHFETAVKLAEKTGMYRLMRPAKVFAARESARLIETHADGEVSR

SEQ ID NO: 193 - DNA, 90 bp, Artificial Sequence
  Synthetic
aacaaacagacaatctggtctgtttgtattatggaaaatttttctgtataatagattcaacaaacagacaatctggtctgtttgtattat

SEQ ID NO: 194 - DNA, 54 bp, Artificial Sequence
  Synthetic
gcggcgcgccatcgaatggcgcaaaacctttcgcggtatggcatgatagcgccc

SEQ ID NO: 195 - DNA, 54 bp, Artificial Sequence
  Synthetic
gcggcgcgccatcgaatggtgcaaaacctttcgcggtatggcatgatagcgccc

SEQ ID NO: 196 - DNA, 73 bp, Artificial Sequence
  Synthetic
aatcataaaaaatttatttgctttgtgagcggataacaattataatagattcaattgtgagcggataacaatt

SEQ ID NO: 197 - DNA, 24 bp, Artificial Sequence
  Synthetic
actgaactataaggtaggtatatt

SEQ ID NO: 198 - DNA, 28 bp, Artificial Sequence
  Synthetic
ggaagagagtcaattcagggtggtgaat

SEQ ID NO: 199 - DNA, 29 bp, Artificial Sequence
  Synthetic
agagccatcagatttaaggaacataaaaa

SEQ ID NO: 200 - DNA, 22 bp, Artificial Sequence
  Synthetic
ctaaattcccccgaggtcaata

SEQ ID NO: 201 - DNA, 26 bp, Artificial Sequence
  Synthetic
agatcatttccaataagggggacact

SEQ ID NO: 202 - DNA, 26 bp, Artificial Sequence
  Synthetic
agacaccgaaacctaaggagggatat

SEQ ID NO: 203 - DNA, 25 bp, Artificial Sequence
  Synthetic
agaccaaacaattaggaggacaaat

SEQ ID NO: 204 - DNA, 35 bp, Artificial Sequence
  Synthetic
acccaacaccaccagcaagcctaaggaggagaaat

SEQ ID NO: 205 - DNA, 30 bp, Artificial Sequence
  Synthetic
agagccaccatttataaggagaacctaccg

SEQ ID NO: 206 - DNA, 22 bp, Artificial Sequence
  Synthetic
atataaagttaaggagttgcac

SEQ ID NO: 207 - DNA, 25 bp, Artificial Sequence
  Synthetic
agaaatattacaacgaggtaaaggc

SEQ ID NO: 208 - DNA, 25 bp, Artificial Sequence
  Synthetic
agagcattccataaggagaaatttt

SEQ ID NO: 209 - DNA, 41 bp, Artificial Sequence
  Synthetic
cagataaaaaaaatccttagctttcgctaaggatgatttct

SEQ ID NO: 210 - DNA, 90 bp, Artificial Sequence
  Synthetic
ttcagccaaaaaacttaagaccgccggtcttgtccactaccttgcagtaatgcggtggacaggatcggcggttttcttttctcttctcaa

SEQ ID NO: 211 - DNA, 117 bp, Artificial Sequence
  Synthetic
ttggtaacgaatcagacaattgacggctcgagggagtagcatagggtttgcagaatccctgcttcgtccatttgacaggcacattatgcatcgatgataagctgtcaaacatgagca

SEQ ID NO: 212 - DNA, 58 bp, Artificial Sequence
  Synthetic
tccggcaaaaaagggcaaggtgtcaccaccctgccctttttctttaaaaccgaaaaga

SEQ ID NO: 213 - DNA, 53 bp, Artificial Sequence
  Synthetic
ccaattattgaaggcctccctaacggggggcctttttttgtttctggtctccc

SEQ ID NO: 214 - DNA, 47 bp, Artificial Sequence
  Synthetic
aaaaaaaaaaaacaccctaacgggtgtttttttttttttggtgtccc

SEQ ID NO: 215 - DNA, 252 bp, Artificial Sequence
  Synthetic
ttggtaacgaatcagacaattgacggctcgagggagtagcatagggtttgcagaatccctgcttcgtccatttgacaggcacattatgcatcgatgataagctgtcaaacatgagcagatcctctacgccggacgcatcgtggccggcatcaccggcgccacaggtgcggttgctggcgcctatatcgccgacatcaccgatggggaagatcgggctcgccacttcgggctcatgagcaaatattttatctg

SEQ ID NO: 216 - DNA, 75 bp, Artificial Sequence
  Synthetic
agcggtcaacgcatgtgctttgcgttctgatgagacagtgatgtcgaaaccgcctctacaaataattttgtttaa

SEQ ID NO: 217 - DNA, 42 bp, Artificial Sequence
  Synthetic
atgtcatattaccaccatcaccatcatcacgggtccctgcag

SEQ ID NO: 218 - DNA, 39 bp, Artificial Sequence
  Synthetic
catcaccatcaccaccatggatatgatattagcacaggt

SEQ ID NO: 219 - DNA, 57 bp, Artificial Sequence
  Synthetic
tgcatgtcatattacgactccattcccacaagcgagaacttgtactttcaagggtgc

SEQ ID NO: 220 - DNA, 288 bp, Artificial Sequence
  Synthetic
gactcagaagtcaatcaagaagctaagccagaggtcaagccagaagtcaagcctgagactcacatcaatttaaaggtgtccgatggatcttcagagatcttcttcaagatcaaaaagaccactcctttaagaaggctgatggaagcgttcgctaaaagacagggtaaggaaatggactccttaagattcttgtacgacggtattagaattcaagctgatcaggcccctgaagatttggacatggaggataacgatattattgaggctcaccgcgaacagattggaggt

SEQ ID NO: 221 - DNA, 1086 bp, Artificial Sequence
  Synthetic
atgaaaccagtaacgttatacgatgtcgcagagtatgccggtgtctcttatcagaccgtttcccgcgtggtgaaccaggccagccacgtttctgcgaaaacgcgggaaaaagtggaagcggcgatggcggagctgaattacattcccaaccgcgtggcacaacaactggcgggcaaacagtcgttgcttattggcgttgccacctccagtctggccctgcacgcgccgtcgcaaattgtcgcggcgattaaatctcgcgccgatcaactgggtgccagcgtggtggtgtcgatggtagaacgaagcggcgtcgaagcctgtaaagcggcggtgcacaatcttctcgcgcaacgcgtcagtgggctgatcattaactatccgctggatgaccaggatgccattgctgtggaagctgcctgcactaatgttccggcgttatttcttgatgtctctgaccagacacccatcaacagtattattttctcccatgaggacggtacgcgactgggcgtggagcatctggtcgcattgggtcaccagcaaatcgcgctgttagcgggcccattaagttctgtctcggcgcgtctgcgtctggctggctggcataaatatctcactcgcaatcaaattcagccgatagcggaacgggaaggcgactggagtgccatgtccggttttcaacaaaccatgcaaatgctgaatgagggcatcgttcccactgcgatgctggttgccaacgatcagatggcgctgggcgcaatgcgcgccattaccgagtccgggctgcgcgttggtgcggatatctcggtagtgggatacgacgataccgaagatagctcatgttatatcccgccgttaaccaccatcaaacaggattttcgcctgctggggcaaaccagcgtggaccgcttgctgcaactctctcagggccaggcggtgaagggcaatcagctgttgccagtctcactggtgaaaagaaaaaccaccctggcgcccaatacgcaaaccgcctctccccgcgcgttggccgattcattaatgcagctggcacgacaggtttcccgactggaaagcgggcagtgataa

SEQ ID NO: 222 - DNA, 615 bp, Artificial Sequence
  Synthetic
atgagcccgaaacgtcgtacccaggcagaacgtgcaatggaaacccagggtaaactgattgcagcagcactgggtgttctgcgtgaaaaaggttatgcaggttttcgtattgcagatgttccgggtgcagccggtgttagccgtggtgcacagagccatcattttccgaccaaactggaactgctgctggcaacctttgaatggctgtatgagcagattaccgaacgtagccgtgcacgtctggcaaaactgaaaccggaagatgatgttattcagcagatgctggatgatgcagcagatttttttctggatgatgattttagcatcggcctggatctgattgttgcagcagatcgtgatccggcactgcgtgaaggtattctgcgtaccgttgaacgtaatcgttttgttgttgaagatatgtggctgggtgtgctggtgagccgtggtctgagccgtgatgatgccgaagatattctgtggctgatttttaacagcgttcgtggtctgacagttcgtagcctgtggcagaaagataaagaacgttttgaacgtgtgcgtaatagcaccctggaaattgcacgtgaacgttatgcaaaattcaaacgttgataa

SEQ ID NO: 223 - DNA, 549 bp, Artificial Sequence
  Synthetic
atgcacggtaaactgctgatctgcgcaactgcttcgatcaacgtcatcaatatcaaccattatattgtggagctgaaacagcacttcgatgaggtgaatatcctgttttcaccttcctcgaagaactttatcaacaccgatgtcctgaagctgttttgcgataatctgtatgacgagatcaaagatccgctgctgaaccacatcaacatagtggagaaccacgagtatatcttggtgctgcctgccagtgccaatacgatcaacaaaatcgcgaacggtatatgcgataacctcttgacgaccgtatgcttaaccgggtaccagaaactgtttatctttccgaatatgaacatccgcatgtggggaaatccgttcttacagaaaaatattgacctgcttaaaagcaacgacgtgaaggtgtattcccccgacatgaacaaatcttttgagataagctcaggccgctacaaaaataacatcacgatgccgaatatcgaaaacgtgctgaattttgtcctgaacaatgagaaacgcccgctggattaataa

SEQ ID NO: 224 - DNA, 1041 bp, Artificial Sequence
  Synthetic
atgtctatcgaactgacgcctagtttggccgatctggtcgatccacttccaggtcacgcactgcgcgctgcggcgacattacgtctggcagatctgattgcggctggtgcagatactgcaccggcattagcagcggcggcacgcattgatgctgacgcgatcgcgcgtcttatgcggtatctgtgcagtcgcgggatttttcaagcacatgaaggccggtacgcgttgactgaatttagcgaattgctgctggatgaagatccatctggcctgcgtaaaaccttagatcaggatagctatggggatcgtttcgaccgcgcggttgcggaactggtggacgttgtacggtccggtgaaccttcttatcctcgcctttacggctcgacggtttatgatgacctggcagccgatcctgccctcggcgaggtgttcgcggatgttcgtggcttgcactccgcagggtatggggaagatgtcgcggcagtggcgggttggtcctcatgcctgcgcgttgtcgatctgggtggagggactggctccgtcctgcttgctgtgttagagcgtcacccgtccctgtcaggcgcagtactggatctgccatacgtcgccccgcaggcaaagaaagctctgcaggcctcagcgtttgcccaacgttgtgaatttatcaaagggagcttcttcgatccgttacctccggcagaccgttacctgttgtgtaacgtgctgttcaactgggatgacgcgcaagcaggcgctattttggcacgctgtgcgcaggcgggccctgtggccggagtagtggtagccgaacgtttgatcgatccggatgcggaagtggaactcgtagcagctcaagatctgcgtctgttggctgtttgcggcggtcggcagcgtggcaccgctgaattcgaagcgcttggggcagcccatggcctggcgttaaccagcgttaccctcacggcatctggtatgagcctgctccgtttcgatgtgtgtcgtgccgggagtgctggcggggaagttgtggaaaaatcttaataa

SEQ ID NO: 225 - DNA, 2331 bp, Artificial Sequence
  Synthetic
atgcaatctacaccattactgcaaatacaaccacatttccatgtagaggtcattgaaccaaagcaagtctacttgttgggtgaacaagctaatcatgcattgacaggccaattatactgccaaattttgccattgttaaacggacaatacacattggaacaaatcgttgaaaaactagacggagaagtaccacctgaatacattgattatgtgctggagagactagctgagaagggctatctgactgaagcagcacctgaattatctagtgaagtggccgctttctggtctgagctggggattgcacctcctgtcgcggccgaagcattacgtcaacctgtgactttaacacctgttggaaacatcagcgaagtaacagtagcagccttaaccacagccctacgtgatatcggtatttccgttcaaacacctacagaagctggatcgccaactgcattgaacgttgtacttaccgatgattatctccaaccagaactcgctaagatcaataagcaagccttagaaagtcaacaaacttggctacttgtcaaaccagttggctccgtgttatggttgggtccggtattcgtgccaggaaaaacaggttgctgggattgtttggctcacagattaagggggaatagagaggtagaggcctctgtattgagacaaaaacaagctcaacaacaacgtaatggacaaagcgggtctgtaataggatgccttcccacggctagagcgacactgccctcaacactccaaactgggctgcagttcgctgctaccgaaattgctaaatggatagttaagtatcatgttaatgccacagcgcctggcaccgtattcttccctacattggatggtaagataattacgctaaatcactccatactggatttgaagtcacatattctgatcaagcgttctcaatgtcccacctgtggtgacccaaaaatcttacagcaccgtggtttcgaacctttaaaacttgagtcaaggcctaaacagttcacctcagacggcggacatcgtggtactacccctgaacaaactgtccagaaatatcaacatttaatctcgcctgttaccggtgtagttactgaattggtcaggataactgatccggccaatccactagttcacacatatagagctggtcatagcttcgggagcgctacatcgctgagagggctgcgtaataccttaaagcataagagttcaggtaagggtaagactgattctcaaagtaaagcctcgggcctgtgtgaggcggtagaacgttactcaggaatctttcaaggtgacgaaccgagaaaacgcgccacattggctgaattgggagatttggcaattcaccctgagcaatgcttgtgtttttccgacggtcagtacgctaatagagaaactttaaacgaacaggcaacggtggcacatgattggatacctcaacgttttgatgcatcacaagctattgaatggactccagtctggtccctaactgaacagacccataaatatttgcccaccgcattgtgttactaccattatcctctacccccagaacacagattcgcacgtggagattcgaatggtaatgctgccggaaatacgttggaagaggctatactccaaggcttcatggaattagtcgagagagatggtgtggctttatggtggtataacaggctacgcagacccgctgtagacttaggctcatttaacgagccatacttcgttcagttgcaacaattctacagagaaaacgatagagatttgtgggttttggacttgacagctgatttaggtatcccggctttcgcgggcgtttctaatagaaaaactggtagttcggagaggttgatattaggattcggtgcacacctcgatcctactattgcaattctgagagcagttacagaagttaaccagattggccttgaattagataaagttccagacgagaaccttaagagcgacgcaacagattggctaattactgaaaaattagctgaccacccttatttgttaccagatacaactcaacctctaaaaactgctcaagattatcctaaaaggtggtctgacgatatatacacggacgtaatgacttgcgttaatattgctcaacaagcaggacttgaaactctagttattgatcaaacacgtccggacattggtttgaatgttgttaaggtgacagtcccggggatgaggcacttttggtcaagatttggagaggggaggctttatgacgtgcccgtcaaattaggttggcttgacgaacctttgaccgaagcgcaaatgaaccccacgccgatgcctttttaataa

SEQ ID NO: 226 - DNA, 1125 bp, Artificial Sequence
  Synthetic
atgagcctgacgaatgtcaagccgttgattaaagaatcccaccacatcattttagctgacgatggtgacatttgcattggggaaattccgggggtgtctcaggtaatcaatgacccgccgtcgtgggttcgtcctgccctggcaaagatggatggcaagcgtactgtcccccgtattttcaaagaactggtcagtgaaggcgtacagatcgaatccgaacatctggaaggcctggtagccgggcttgccgaacgcaaacttctccaggataacagtttcttttccaaggtgttaagcggtgaagaagtggagcgctataaccgccagattctgcagttcagccttatcgatgcggataaccagcaccctttcgtttaccaagagcggctgaaacagtctaaagtcgctatcttcggtatgggtggctggggcacgtggtgtgcattgcagctggccatgtcaggcattggtacactgcggctgatcgacggcgatgatgtggaactgtcgaacattaaccgccaagttctgtatcgcacggatgatgtaggtaaaaacaaagttgatgccgccaaagacactatcctggcatacaacgaaaacgtgcatgttgaaaccttctttgaattcgccagcccggaccgtgcccggcttgaagaacttgtgggtgattctacctttattatcctggcttgggccgcgttgggttactaccgtaaagatacggcagaggaaattatccattcgattgcgaaagataaagcgatccctgtaattgaactcggcggtgatcctttggaaatctctgtcggtcctatttacctgaatgatggcgtacacagcggcttcgacgaggtgaaaaattccgttaaagataaatactacgacagcaacagcgatatccgcaaatttcaagaggcgcggttgaaacacagcttcatcgatggcgatcgtaaagtgaacgcgtggcaatcagcgcccagcctgagtattatggctggtatcgtaacggatcaggttgtgaaaaccattaccgggtacgacaagccacatctcgttggcaagaaatttatcttgagtctgcaagatttccgcagccgcgaggaggagatctttaaataataa

SEQ ID NO: 227 - DNA, 945 bp, Artificial Sequence
  Synthetic
atgaccgaacgtgccgcagtgcgtaccgaccattataaagcctttgggtttagaattgaaagcgatttcgtgctcccggaacttccgcccgcaggcgaacgcgaaccgctcgataatattacggttcgtcgtaccgacctgcagccgctctggaattctagtatccatttttacggaaactttgccattctggatcacggacgcacggttatgtttcgagttccgggtgctgctatctatgcggtacaggatgctagcagcatattagtgtccccattcgatcaggcagaagaaaactgggtacgtctttttattctgggtacctgtattgggatcatcctgctgcagcgtaagattatgccgctgcacggtagcgccgttgccattgatggcaaagcctacgcgattatcggcgaatctggtgccggcaaaagcactcttgcactgcatcttgtcagtaagggttatccattgctttcggatgatgtgattccggtcgttatgacccagggctccccctgggtggtgccgtcgtacccgcaacaaaaactttgggtggacactctgaagcacatgggaatggataatgcaaactatacgccgctgtacgaacgtaaaacgaagttcgcggtgcccgtgggcagtaatttccacgaagaaccgctgccgttagctagcattttcgagcttgtcccgtgggatgcggcaacgcacattgccccgatccaagggatggaacgctttcgtgtcctgttccaccacacttatcggaactttctggttcagccgctgggtcttatggaatggcattttaaaactctgagctcgttcgttcaccaaattggaatgtatcgtctgcatagacctatggtcggattcagtaccttagatttaacgtcgcacattctgaatataacgcgtcagggagagaacgatcaataataa

SEQ ID NO: 228 - DNA, 1302 bp, Artificial Sequence
  Synthetic
atggggaatttgcgtgatttctaccaactgatgaaagataactatgcggactctaatctgttcaaggatttgaatctgatccacaatatctccaacgacatccaaattggaattaattgcgatttctctgaaatgctgggagaactggtaggtaattacgattccctgaactatccgtcaatcacctgtggtattctgacgtataatgaagaacgctgcattaaacgttgtctggaaagtgtggtgaacgaattcgatgagattattgtcttggatagtgtatccgaggacaataccgtgaaaattatcaaggagaatttcaacgatgtcaaagtctacgtcgagccatggaagaacgatttttcatttcaccgcaacaagatcattaatctcgcaacgtgcgactggatctactttatcgacgcggataattattatgattcgaagaacaagggtaaagccatgcgcatcgctaaggttatggatttcttgaaaatcgaaggcgttgtgagcccaacggtcattgagcatgacaatagcatgagccgtgatacccgtaagatgtttcgtctgaaagataacattctgtttagcggtaaagttcatgaagaaccggtgtatgccaatggtgagatcccccggaacatcatagtagacatcaacgtgtttcacgacggctataacccaaagattatcaacatgatggaaaagaacgagcgcaatatcaccctgactaaagagatgatgaagatcgaaccgaacaatccgaaatggctgtacttctatagccgcgaactctatcagacgcaacgtgacattgcccttgtgcaaagtgtactgttcaaggcactggaactgtatgaaaacagttcatatacgcgttattatgttgacaccattgccttactgtgccgagtgctgttcgaatctaaaaactaccagaaacttacggaatgtctgaacatcctggagaacaatacgcttaactgttccgatatcgattactataattcagcgctgctgttctacaacctgttactgcgcatcaagaaaattagctccaccctgaaggagaacattgatatgtacgaacgtgactatcatagctttatcaacccctcgcatgatcacattaagattctgatattaaatatgctcctgctgctcggcgattaccaggatgcctttaaggtttacaaggagatcaagtccattgagattaaagatgagtttctggtgaacgtgaacaaattcaaagacaatcttctgagcttcattgactccattaacaaaatttaataa

SEQ ID NO: 229 - DNA, 1263 bp, Artificial Sequence
  Synthetic
atgaccaaaaagtatcggcgtgtatcctacgcagtgtgggaaatcaccctgaaatgcaatctggcatgctctcattgtggcagccgcgccggccaagcccgtacgaaagagctgagtaccgaagaagcgttcaacctggtccgccagctggccgacgtgggcattaaggaagtcaccctgatcggtggtgaagcctttatgcgttcggattggctggaaatcgcgaaagccgtcactgaagccggcatgatctgtggcatgaccacagggggcttcggggtcagtctggaaacggcgcgtaaaatgaaagaagcgggcattaaaacggtgagcgttagcattgacggtggtattcctgaaacccacgaccgccagcgcggtaaaaagggtgcgtggcatagtgcattccggactatgagccatctgaaagaagtcgggatctacttcggttgcaacactcaaatcaatcgtttatcggcgtcagaattcccgattatctatgaacgtattcgcgatgctggggcacgtgcgtggcaaattcagctgacggttccgatgggcaacgccgcggataacgcagatatgctgctgcaaccgtatgaattgctcgacatctatccgatgttagcccgcgttgccaaacgtgcgaaacaggaaggcgtgcgtattcaggcaggtaacaacatcgggtactatggaccgtatgagcgtctgctgcgtggcagcgacgaatggacgttttggcaaggatgtggtgcgggccttaacaccctcggcatcgaagccgacggcaaaatcaaaggctgtccatccctgccgaccgccgcgtacaccggcggtaacattcgcgatcgcccgctgcgggaaatcgtcgaacagaccgaagaactgaaatttaacttaaaagctggtacagaacaaggtacggaccatatgtggggcttttgtaaaacctgcgaattcgcggaactctgtcgcggcggatgcagctggactgcgcatgtgttctttgaccggcgcggcaataatccgtactgccaccatcgggctctgaaacaagcccaaaaagacattcgcgaacgcttttatttaaaagtgaaagcaaagggcaacccgttcgacaatggtgaatttgttatcattgaagaaccttttaacgctccgttacccgagaatgacctgctgcactttaacagtgatcacattcaatggccagaaaactggcaaaatagtgaaagcgcgtacgcattggccaagtaataa

SEQ ID NO: 230 - DNA, 168 bp, Artificial Sequence
  Synthetic
atgaacagtaatcagatccctaacaaagttgcaaccgcggcacagaaatctgacgacagcagcagcgtattaccgcgccaggggtggcaagacaaacaagcctttattaaggcactcattaaagccaaacagtctctcgaaattgccgaaattagcaactttttaacc

SEQ ID NO: 231 - DNA, 933 bp, Artificial Sequence
  Synthetic
atgaaaaccattctgattattaccaataccctggatctgaccgtggattatattattaatcgctataatcataccgctaaattttttcgtctgaataccgatcgtttttttgattatgatattaatattaccaatagcggtaccagcattcgtaatcgtaaatctaatctgattattaatattcaggaaattcatagcctgtattatcgcaaaattaccctgccgaatctggatggctatgaaagtaaatattggaccctgatgcagcgcgaaatgatgagtattgttgaaggcattgcagaaaccgctggcaattttgcactgacccgtccgtctgtgctgcgcaaagctgataataaaattgtgcagatgaaactggcagaagaaattggttttattctgccgcagagtctgattaccaattcaaatcaggcggcagcctcattttgcaataaaaataataccagcattgtgaaaccgctgagtaccggccgcattctgggtaaaaataaaattggcattattcagaccaatctggttgaaacccatgaaaatattcagggcctggaactgtctccggcttattttcaggattatattccgaaagataccgaaattcgtctgaccattgttggtaataaactgtttggcgccaatattaaatcaaccaatcaggttgattggcgcaaaaatgatgcactgctggaatataaaccggccaatattccggataaaattgccaaaatgtgtctggaaatgatggaaaaactggaaattaattttgcggcgtttgattttattattcgtaatggtgattatatttttctggaactgaatgccaatggtcagtggctgtggctggaagatattctgaaatttgatatttcaaataccattattaattatctgctgggtgaaccgatttaataataa

SEQ ID NO: 232 - DNA, 936 bp, Artificial Sequence
  Synthetic
atgacgagaaccaacaccggctatcgttatcgcgcgttcggcctgcgcatagactcagatattccgctgccagaattaggggacggtacgcgccctgatggtgacgcggatctgacggtcgtccggtgtggggaagcggagccggaatgggctgaaggtggtggcgggggtcgtctgtatgccgctgaaggcattgtatcttttcgcgtgccgcagacggcagcgttccgtattactaatggaaatcgcatcgaggtgcatgcctactcgggggctgatgaggatcgaatacgcctgtacgtgttagggacctgtatgggagcgctgttactgcaacgtagaatcttaccgcttcatggttcggtcgtcgcccgtgatggtcgtgcgtatgccatagttggcgaaagcggagcgggcaaatccacgatgagtgcagcacttctcgaacgtggattccgcctcgttacggatgacgtggccgccatcgtgttcgatgagcgtgggaccccactggttatgccggcttatccacagcaaaaactgtggcaggattccctggaccgtctgcaaattgcgggctcgggccttcgtccgctgttcgaacgcgaaacgaaatacgctgtacccgcggatggggcattctggcccgaaccggttccattggtgcacatttacgaactggttcatagcgatggtcaaacgcctgaactgcagccgattgccaaattagagcgttgctataccttgtatcgccacacatttcgtagaagcctgatcgtccccagcggcttaagcgcctggcattttgaaacggcagtgaaacttgcggagaaaacggggatgtaccgtcttatgcgcccggccaaagttttcgcggctcgcgaatctgctcggctgattgaaactcacgccgatggtgaagtgtcacgttaataa

SEQ ID NO: 233 - DNA, 159 bp, Artificial Sequence
  Synthetic
gaagcagttaaagagaagaacgatctgttcaacctggatgttaaagtcaacgcaaaagaaagtaacgatagtggcgcagaaccacgcatagcgtcgaaatttatttgcacaccaggctgcgcgaaaacgggttcgtttaacagctattgttgttaataa

SEQ ID NO: 234 - DNA, 123 bp, Artificial Sequence
  Synthetic
atggacaaacgtgtgcgttacgaaaaaccgagcctggtgaaagagggtacgtttcgcaaaactaccgctggcctgcggcgtctgttcgctgaccagctggttggccgccgtaacatttaataa

SEQ ID NO: 235 - DNA, 96 bp, Artificial Sequence
  Synthetic
atgattaaattttctacattgtctcagcgcatcagcgccatcacggaagaaaacgccatgtacactaagggtcaagtgatcgtattgagctgataa

SEQ ID NO: 236 - DNA, 129 bp, Artificial Sequence
  Synthetic
aaaaagcaatatagcaaacctagcctggaggttctggacgtccaccagaccatggctggcccgggcactagtacgccagacgcgtttcagccagatccagatgaagatgttcactatgattcgtaataa

SEQ ID NO: 237 - DNA, 186 bp, Artificial Sequence
  Synthetic
aaagatcttctgaaggaactgatgtatgaagtagacctcgaagagatggagaatcttcagggtagcgggtactcagccgcccagtgtgcctggatggcgctgagctgcgtcaattacatcccgggagtgggattcggttgtggcggctacagcgcatgtgaactctacaagcgttattgttaataa

SEQ ID NO: 238 - DNA, 300 bp, Artificial Sequence
  Synthetic
atgtctattgagagtgcaaaggctttctaccagcgtatgacggatgacgcatcttttcgtaccccttttgaagcggaactgtcgaaagaggagcgccaacaattaatcaaagatagcggatatgactttactgcagaagaatggcaacaggctatgaccgagatccaggcggcacgctcaaacgaggaactgaatgaggaagaactcgaggcaattgccgggggcgctgtggccgcaatgtatggtgtggttttcccatgggacaacgagttcccgtggccccgctggggcggttaataa

SEQ ID NO: 239 - DNA, 195 bp, Artificial Sequence
  Synthetic
tatcgaccttatattgccaagtatgtcgaagaacaaactctgcagaattcaaccaacctggtatatgacgacatcacgcagatctcttttatcaataaagaaaagaacgtgaaaaaaattaatctgggtcccgatactacgatcgtgactgaaaccatcgagaatgcggaccccgatgagtatttcttataataa

SEQ ID NO: 240 - DNA, 129 bp, Artificial Sequence
  Synthetic
cgcaagaaagaatggcagacaccagaactggaagtactcgatgtacgcctcaccgcagcgggcccgggtaaagctaaaccggatgctgtgcagccagacgaagatgaaatagtgcactactcataataa

SEQ ID NO: 241 - DNA, 2215 bp, Artificial Sequence
  Synthetic
agtaagacgggtaagcctgttgatgataccgctgccttactgggtgcattagccagtctgaatgacctgtcacgggataatccgaagtggtcagactggaaaatcagagggcaggaactgctgaacagcaaaaagtcagatagcaccacatagcagacccgccataaaacgccctgagaagcccgtgacgggcttttcttgtattatgggtagtttccttgcatgaatccataaaaggcgcctgtagtgccatttacccccattcactgccagagccgtgagcgcagcgaactgaatgtcacgaaaaagacagcgactcaggtgcctgatggtcggagacaaaaggaatattcagcgatttgcccgagcttgcgagggtgctacttaagcctttagggttttaaggtctgttttgtagaggagcaaacagcgtttgcgacatccttttgtaatactgcggaactgactaaagtagtgagttatacacagggctgggatctattctttttatctttttttattctttctttattctataaattataaccacttgaatataaacaaaaaaaacacacaaaggtctagcggaatttacagagggtctagcagaatttacaagttttccagcaaaggtctagcagaatttacagatacccacaactcaaaggaaaaggactagtaattatcattgactagcccatctcaattggtatagtgattaaaatcacctagaccaattgagatgtatgtctgaattagttgttttcaaagcaaatgaactagcgattagtcgctatgacttaacggagcatgaaaccaagctaattttatgctgtgtggcactactcaaccccacgattgaaaaccctacaaggaaagaacggacggtatcgttcacttataaccaatacgctcagatgatgaacatcagtagggaaaatgcttatggtgtattagctaaagcaaccagagagctgatgacgagaactgtggaaatcaggaatcctttggttaaaggcttttggattttccagtggacaaactatgccaagttctcaagcgaaaaattagaattagtttttagtgaagagatattgccttatcttttccagttaaaaaaattcataaaatataatctggaacatgttaagtcttttgaaaacaaatactctatgaggatttatgagtggttattaaaagaactaacacaaaagaaaactcacaaggcaaatatagagattagccttgatgaatttaagttcatgttaatgcttgaaaataactaccatgagtttaaaaggcttaaccaatgggttttgaaaccaataagtaaagatttaaacacttacagcaatatgaaattggtggttgataagcgaggccgcccgactgatacgttgattttccaagttgaactagatagacaaatggatctcgtaaccgaacttgagaacaaccagataaaaatgaatggtgacaaaataccaacaaccattacatcagattcctacctacataacggactaagaaaaacactacacgatgctttaactgcaaaaattcagctcaccagttttgaggcaaaatttttgagtgacatgcaaagtaagtatgatctcaatggttcgttctcatggctcacgcaaaaacaacgaaccacactagagaacatactggctaaatacggaaggatctgaggttcttatggctcttgtatctatcagtgaagcatcaagactaacaaacaaaagtagaacaactgttcaccgttacatatcaaagggaaaactgtccatatgcacagatgaaaacggtgtaaaaaagatagatacatcagagcttttacgagtttttggtgcattcaaagctgttcaccatgaacagatcgacaatgtaacagatgaacagcatgtaacacctaatagaacaggtgaaaccagtaaaacaaagcaactagaacatgaaattgaacacctgagacaacttgttacagctcaacagtcacacatagacagcctgaaacaggcgatgctgcttatcgaatcaaagctgccgacaacacgggagccagtgacgcctcccgtggggaaaaaatcatggcaattctggaagaaatagcgctttcagccggcaaaccggctgaagccggatctgcgattctgataacaaactagcaacaccagaacagcccgtttgcgggcagcaaaacccgtac

SEQ ID NO: 242 - DNA, 825 bp, Artificial Sequence
  Synthetic
ttaataagatgatcttcttgagatcgttttggtctgcgcgtaatctcttgctctgaaaacgaaaaaaccgccttgcagggcggtttttcgaaggttctctgagctaccaactctttgaaccgaggtaactggcttggaggagcgcagtcaccaaaacttgtcctttcagtttagccttaaccggcgcatgacttcaagactaactcctctaaatcaattaccagtggctgctgccagtggtgcttttgcatgtctttccgggttggactcaagacgatagttaccggataaggcgcagcggtcggactgaacggggggttcgtgcatacagtccagcttggagcgaactgcctacccggaactgagtgtcaggcgtggaatgagacaaacgcggccataacagcggaatgacaccggtaaaccgaaaggcaggaacaggagagcgcacgagggagccgccaggggaaacgcctggtatctttatagtcctgtcgggtttcgccaccactgatttgagcgtcagatttcgtgatgcttgtcaggggggcggagcctatggaaaaacggctttgccgcggccctctcacttccctgttaagtatcttcctggcatcttccaggaaatctccgccccgttcgtaagccatttccgctcgccgcagtcgaacgaccgagcgtagcgagtcagtgagcgaggaagcggaatatatcctgtatcacatattctgctgacgcaccggtgcagccttttttctcctgccacatgaagcacttcactgacaccctcatcagtgccaacatagtaagccagtatacactccgcta

SEQ ID NO: 243 - DNA, 6229 bp, Artificial Sequence
  Synthetic
cacatttccccgaaaagtgccacctgacgtctaagaaaccattattatcatgacattaacctataaaaataggcgtatcacgaggcagaatttcagataaaaaaaatccttagctttcgctaaggatgatttctggaattcgcggccgcttctagagggagaacgatcgttggctgaatcataaaaaatttatttgctttgtgagcggataacaattataatagattcaattgtgagcggataacaattagaacccaacaccaccagcaagcctaaggaggagaaatatgtcatattaccaccatcaccatcatcacgggtccctgcaggactcagaagtcaatcaagaagctaagccagaggtcaagccagaagtcaagcctgagactcacatcaatttaaaggtgtccgatggatcttcagagatcttcttcaagatcaaaaagaccactcctttaagaaggctgatggaagcgttcgctaaaagacagggtaaggaaatggactccttaagattcttgtacgacggtattagaattcaagctgatcaggcccctgaagatttggacatggaggataacgatattattgaggctcaccgcgaacagattggaggttgcatgtcatattacgactccattcccacaagcgagaacttgtactttcaagggtgcatgagcaaaggagaagaacttttcactggagttgtcccaattcttgttgaattagatggtgatgttaatgggcacaaattttctgtccgtggagagggtgaaggtgatgctacaaacggaaaactcacccttaaatttatttgcactactggaaaactacctgttccgtggccaacacttgtcactactctgacctatggtgttcaatgcttttcccgttatccggatcacatgaaacggcatgactttttcaagagtgccatgcccgaaggttatgtacaggaacgcactatatctttcaaagatgacgggacctacaagacgcgtgctgaagtcaagtttgaaggtgatacccttgttaatcgtatcgagttaaagggtattgattttaaagaagatggaaacattcttggacacaaactcgagtacaactttaactcacacaatgtatacatcacggcagacaaacaaaagaatggaatcaaagctaacttcaaaattcgccacaacgttgaagatggttccgttcaactagcagaccattatcaacaaaatactccaattggcgatggccctgtccttttaccagacaaccattacctgtcgacacaatctgtcctttcgaaagatcccaacgaaaagcgtgaccacatggtccttcttgagtttgtaactgctgctgggattacacatggcatggatgagctctacaaataattcagccaaaaaacttaagaccgccggtcttgtccactaccttgcagtaatgcggtggacaggatcggcggttttcttttctcttctcaaccaatggcggcgcgccatcgaatggcgcaaaacctttcgcggtatggcatgatagcgcccggaagagagtcaattcagggtggtgaatatgaaaccagtaacgttatacgatgtcgcagagtatgccggtgtctcttatcagaccgtttcccgcgtggtgaaccaggccagccacgtttctgcgaaaacgcgggaaaaagtggaagcggcgatggcggagctgaattacattcccaaccgcgtggcacaacaactggcgggcaaacagtcgttgcttattggcgttgccacctccagtctggccctgcacgcgccgtcgcaaattgtcgcggcgattaaatctcgcgccgatcaactgggtgccagcgtggtggtgtcgatggtagaacgaagcggcgtcgaagcctgtaaagcggcggtgcacaatcttctcgcgcaacgcgtcagtgggctgatcattaactatccgctggatgaccaggatgccattgctgtggaagctgcctgcactaatgttccggcgttatttcttgatgtctctgaccagacacccatcaacagtattattttctcccatgaggacggtacgcgactgggcgtggagcatctggtcgcattgggtcaccagcaaatcgcgctgttagcgggcccattaagttctgtctcggcgcgtctgcgtctggctggctggcataaatatctcactcgcaatcaaattcagccgatagcggaacgggaaggcgactggagtgccatgtccggttttcaacaaaccatgcaaatgctgaatgagggcatcgttcccactgcgatgctggttgccaacgatcagatggcgctgggcgcaatgcgcgccattaccgagtccgggctgcgcgttggtgcggatatctcggtagtgggatacgacgataccgaagatagctcatgttatatcccgccgttaaccaccatcaaacaggattttcgcctgctggggcaaaccagcgtggaccgcttgctgcaactctctcagggccaggcggtgaagggcaatcagctgttgccagtctcactggtgaaaagaaaaaccaccctggcgcccaatacgcaaaccgcctctccccgcgcgttggccgattcattaatgcagctggcacgacaggtttcccgactggaaagcgggcagtgataattggtaacgaatcagacaattgacggctcgagggagtagcatagggtttgcagaatccctgcttcgtccatttgacaggcacattatgcatcgatgataagctgtcaaacatgagcacgcttactagtagcggccgctgcagtccggcaaaaaagggcaaggtgtcaccaccctgccctttttctttaaaaccgaaaagattacttcgcgttatgcaggcttcctcgctcactgactcgctgcgctcggtcgttcggctgcggcgagcggtatcagctcactcaaaggcggtaatgacagtaagacgggtaagcctgttgatgataccgctgccttactgggtgcattagccagtctgaatgacctgtcacgggataatccgaagtggtcagactggaaaatcagagggcaggaactgctgaacagcaaaaagtcagatagcaccacatagcagacccgccataaaacgccctgagaagcccgtgacgggcttttcttgtattatgggtagtttccttgcatgaatccataaaaggcgcctgtagtgccatttacccccattcactgccagagccgtgagcgcagcgaactgaatgtcacgaaaaagacagcgactcaggtgcctgatggtcggagacaaaaggaatattcagcgatttgcccgagcttgcgagggtgctacttaagcctttagggttttaaggtctgttttgtagaggagcaaacagcgtttgcgacatccttttgtaatactgcggaactgactaaagtagtgagttatacacagggctgggatctattctttttatctttttttattctttctttattctataaattataaccacttgaatataaacaaaaaaaacacacaaaggtctagcggaatttacagagggtctagcagaatttacaagttttccagcaaaggtctagcagaatttacagatacccacaactcaaaggaaaaggactagtaattatcattgactagcccatctcaattggtatagtgattaaaatcacctagaccaattgagatgtatgtctgaattagttgttttcaaagcaaatgaactagcgattagtcgctatgacttaacggagcatgaaaccaagctaattttatgctgtgtggcactactcaaccccacgattgaaaaccctacaaggaaagaacggacggtatcgttcacttataaccaatacgctcagatgatgaacatcagtagggaaaatgcttatggtgtattagctaaagcaaccagagagctgatgacgagaactgtggaaatcaggaatcctttggttaaaggcttttggattttccagtggacaaactatgccaagttctcaagcgaaaaattagaattagtttttagtgaagagatattgccttatcttttccagttaaaaaaattcataaaatataatctggaacatgttaagtcttttgaaaacaaatactctatgaggatttatgagtggttattaaaagaactaacacaaaagaaaactcacaaggcaaatatagagattagccttgatgaatttaagttcatgttaatgcttgaaaataactaccatgagtttaaaaggcttaaccaatgggttttgaaaccaataagtaaagatttaaacacttacagcaatatgaaattggtggttgataagcgaggccgcccgactgatacgttgattttccaagttgaactagatagacaaatggatctcgtaaccgaacttgagaacaaccagataaaaatgaatggtgacaaaataccaacaaccattacatcagattcctacctacataacggactaagaaaaacactacacgatgctttaactgcaaaaattcagctcaccagttttgaggcaaaatttttgagtgacatgcaaagtaagtatgatctcaatggttcgttctcatggctcacgcaaaaacaacgaaccacactagagaacatactggctaaatacggaaggatctgaggttcttatggctcttgtatctatcagtgaagcatcaagactaacaaacaaaagtagaacaactgttcaccgttacatatcaaagggaaaactgtccatatgcacagatgaaaacggtgtaaaaaagatagatacatcagagcttttacgagtttttggtgcattcaaagctgttcaccatgaacagatcgacaatgtaacagatgaacagcatgtaacacctaatagaacaggtgaaaccagtaaaacaaagcaactagaacatgaaattgaacacctgagacaacttgttacagctcaacagtcacacatagacagcctgaaacaggcgatgctgcttatcgaatcaaagctgccgacaacacgggagccagtgacgcctcccgtggggaaaaaatcatggcaattctggaagaaatagcgctttcagccggcaaaccggctgaagccggatctgcgattctgataacaaactagcaacaccagaacagcccgtttgcgggcagcaaaacccgtaccgattatcaaaaaggatcttcacctagatccttttaaattaaaaatgaagttttaaatcaatctaaagtatatatgagtaaacttggtctgacagttaccaatgcttaatcagtgaggcacctatctcagcgatctgtctatttcgttcatccatagttgcctgactccccgtcgtgtagataactacgatacgggagggcttaccatctggccccagtgctgcaatgataccgcgagaaccacgctcaccggctccagatttatcagcaataaaccagccagccggaagggccgagcgcagaagtggtcctgcaactttatccgcctccatccagtctattaattgttgccgggaagctagagtaagtagttcgccagttaatagtttgcgcaacgttgttgccattgctacaggcatcgtggtgtcacgctcgtcgtttggtatggcttcattcagctccggttcccaacgatcaaggcgagttacatgatcccccatgttgtgcaaaaaagcggttagctccttcggtcctccgatcgttgtcagaagtaagttggccgcagtgttatcactcatggttatggcagcactgcataattctcttactgtcatgccatccgtaagatgcttttctgtgactggtgagtactcaaccaagtcattctgagaatagtgtatgcggcgaccgagttgctcttgcccggcgtcaatacgggataataccgcgccacatagcagaactttaaaagtgctcatcattggaaaacgttcttcggggcgaaaactctcaaggatcttaccgctgttgagatccagttcgatataacccactcgtgcacccaactgatcttcagcatcttttactttcaccagcgtttctgggtgagcaaaaacaggaaggcaaaatgccgcaaaaaagggaataagggcgacacggaaatgttgaatactcatactcttcctttttcaatattattgaagcatttatcagggttattgtctcatgagcggatacatatttgaatgtatttagaaaaataaacaaataggggttccgcg

SEQ ID NO: 244 - DNA, 6249 bp, Artificial Sequence
  Synthetic
cacatttccccgaaaagtgccacctgacgtctaagaaaccattattatcatgacattaacctataaaaataggcgtatcacgaggcagaatttcagataaaaaaaatccttagctttcgctaaggatgatttctggaattcgcggccgcttctagagggagggtctcagtgcaacgatcgttggctgaatcataaaaaatttatttgctttgtgagcggataacaattataatagattcaattgtgagcggataacaattagaacccaacaccaccagcaagcctaaggaggagaaatatgtcatattaccaccatcaccatcatcacgggtccctgcaggactcagaagtcaatcaagaagctaagccagaggtcaagccagaagtcaagcctgagactcacatcaatttaaaggtgtccgatggatcttcagagatcttcttcaagatcaaaaagaccactcctttaagaaggctgatggaagcgttcgctaaaagacagggtaaggaaatggactccttaagattcttgtacgacggtattagaattcaagctgatcaggcccctgaagatttggacatggaggataacgatattattgaggctcaccgcgaacagattggaggttgcatgtcatattacgactccattcccacaagcgagaacttgtactttcaagggtgcatgagcaaaggagaagaacttttcactggagttgtcccaattcttgttgaattagatggtgatgttaatgggcacaaattttctgtccgtggagagggtgaaggtgatgctacaaacggaaaactcacccttaaatttatttgcactactggaaaactacctgttccgtggccaacacttgtcactactctgacctatggtgttcaatgcttttcccgttatccggatcacatgaaacggcatgactttttcaagagtgccatgcccgaaggttatgtacaggaacgcactatatctttcaaagatgacgggacctacaagacgcgtgctgaagtcaagtttgaaggtgatacccttgttaatcgtatcgagttaaagggtattgattttaaagaagatggaaacattcttggacacaaactcgagtacaactttaactcacacaatgtatacatcacggcagacaaacaaaagaatggaatcaaagctaacttcaaaattcgccacaacgttgaagatggttccgttcaactagcagaccattatcaacaaaatactccaattggcgatggccctgtccttttaccagacaaccattacctgtcgacacaatctgtcctttcgaaagatcccaacgaaaagcgtgaccacatggtccttcttgagtttgtaactgctgctgggattacacatggcatggatgagctctacaaataattcagccaaaaaacttaagaccgccggtcttgtccactaccttgcagtaatgcggtggacaggatcggcggttttcttttctcttctcaacaagtgagaccatgggcggcgcgccatcgaatggcgcaaaacctttcgcggtatggcatgatagcgcccggaagagagtcaattcagggtggtgaatatgaaaccagtaacgttatacgatgtcgcagagtatgccggtgtctcttatcagaccgtttcccgcgtggtgaaccaggccagccacgtttctgcgaaaacgcgggaaaaagtggaagcggcgatggcggagctgaattacattcccaaccgcgtggcacaacaactggcgggcaaacagtcgttgcttattggcgttgccacctccagtctggccctgcacgcgccgtcgcaaattgtcgcggcgattaaatctcgcgccgatcaactgggtgccagcgtggtggtgtcgatggtagaacgaagcggcgtcgaagcctgtaaagcggcggtgcacaatcttctcgcgcaacgcgtcagtgggctgatcattaactatccgctggatgaccaggatgccattgctgtggaagctgcctgcactaatgttccggcgttatttcttgatgtctctgaccagacacccatcaacagtattattttctcccatgaggacggtacgcgactgggcgtggagcatctggtcgcattgggtcaccagcaaatcgcgctgttagcgggcccattaagttctgtctcggcgcgtctgcgtctggctggctggcataaatatctcactcgcaatcaaattcagccgatagcggaacgggaaggcgactggagtgccatgtccggttttcaacaaaccatgcaaatgctgaatgagggcatcgttcccactgcgatgctggttgccaacgatcagatggcgctgggcgcaatgcgcgccattaccgagtccgggctgcgcgttggtgcggatatctcggtagtgggatacgacgataccgaagatagctcatgttatatcccgccgttaaccaccatcaaacaggattttcgcctgctggggcaaaccagcgtggaccgcttgctgcaactctctcagggccaggcggtgaagggcaatcagctgttgccagtctcactggtgaaaagaaaaaccaccctggcgcccaatacgcaaaccgcctctccccgcgcgttggccgattcattaatgcagctggcacgacaggtttcccgactggaaagcgggcagtgataattggtaacgaatcagacaattgacggctcgagggagtagcatagggtttgcagaatccctgcttcgtccatttgacaggcacattatgcatcgatgataagctgtcaaacatgagcacgcttactagtagcggccgctgcagtccggcaaaaaagggcaaggtgtcaccaccctgccctttttctttaaaaccgaaaagattacttcgcgttatgcaggcttcctcgctcactgactcgctgcgctcggtcgttcggctgcggcgagcggtatcagctcactcaaaggcggtaatgacagtaagacgggtaagcctgttgatgataccgctgccttactgggtgcattagccagtctgaatgacctgtcacgggataatccgaagtggtcagactggaaaatcagagggcaggaactgctgaacagcaaaaagtcagatagcaccacatagcagacccgccataaaacgccctgagaagcccgtgacgggcttttcttgtattatgggtagtttccttgcatgaatccataaaaggcgcctgtagtgccatttacccccattcactgccagagccgtgagcgcagcgaactgaatgtcacgaaaaagacagcgactcaggtgcctgatggtcggagacaaaaggaatattcagcgatttgcccgagcttgcgagggtgctacttaagcctttagggttttaaggtctgttttgtagaggagcaaacagcgtttgcgacatccttttgtaatactgcggaactgactaaagtagtgagttatacacagggctgggatctattctttttatctttttttattctttctttattctataaattataaccacttgaatataaacaaaaaaaacacacaaaggtctagcggaatttacagagggtctagcagaatttacaagttttccagcaaaggtctagcagaatttacagatacccacaactcaaaggaaaaggactagtaattatcattgactagcccatctcaattggtatagtgattaaaatcacctagaccaattgagatgtatgtctgaattagttgttttcaaagcaaatgaactagcgattagtcgctatgacttaacggagcatgaaaccaagctaattttatgctgtgtggcactactcaaccccacgattgaaaaccctacaaggaaagaacggacggtatcgttcacttataaccaatacgctcagatgatgaacatcagtagggaaaatgcttatggtgtattagctaaagcaaccagagagctgatgacgagaactgtggaaatcaggaatcctttggttaaaggcttttggattttccagtggacaaactatgccaagttctcaagcgaaaaattagaattagtttttagtgaagagatattgccttatcttttccagttaaaaaaattcataaaatataatctggaacatgttaagtcttttgaaaacaaatactctatgaggatttatgagtggttattaaaagaactaacacaaaagaaaactcacaaggcaaatatagagattagccttgatgaatttaagttcatgttaatgcttgaaaataactaccatgagtttaaaaggcttaaccaatgggttttgaaaccaataagtaaagatttaaacacttacagcaatatgaaattggtggttgataagcgaggccgcccgactgatacgttgattttccaagttgaactagatagacaaatggatctcgtaaccgaacttgagaacaaccagataaaaatgaatggtgacaaaataccaacaaccattacatcagattcctacctacataacggactaagaaaaacactacacgatgctttaactgcaaaaattcagctcaccagttttgaggcaaaatttttgagtgacatgcaaagtaagtatgatctcaatggttcgttctcatggctcacgcaaaaacaacgaaccacactagagaacatactggctaaatacggaaggatctgaggttcttatggctcttgtatctatcagtgaagcatcaagactaacaaacaaaagtagaacaactgttcaccgttacatatcaaagggaaaactgtccatatgcacagatgaaaacggtgtaaaaaagatagatacatcagagcttttacgagtttttggtgcattcaaagctgttcaccatgaacagatcgacaatgtaacagatgaacagcatgtaacacctaatagaacaggtgaaaccagtaaaacaaagcaactagaacatgaaattgaacacctgagacaacttgttacagctcaacagtcacacatagacagcctgaaacaggcgatgctgcttatcgaatcaaagctgccgacaacacgggagccagtgacgcctcccgtggggaaaaaatcatggcaattctggaagaaatagcgctttcagccggcaaaccggctgaagccggatctgcgattctgataacaaactagcaacaccagaacagcccgtttgcgggcagcaaaacccgtaccgattatcaaaaaggatcttcacctagatccttttaaattaaaaatgaagttttaaatcaatctaaagtatatatgagtaaacttggtctgacagttaccaatgcttaatcagtgaggcacctatctcagcgatctgtctatttcgttcatccatagttgcctgactccccgtcgtgtagataactacgatacgggagggcttaccatctggccccagtgctgcaatgataccgcgagaaccacgctcaccggctccagatttatcagcaataaaccagccagccggaagggccgagcgcagaagtggtcctgcaactttatccgcctccatccagtctattaattgttgccgggaagctagagtaagtagttcgccagttaatagtttgcgcaacgttgttgccattgctacaggcatcgtggtgtcacgctcgtcgtttggtatggcttcattcagctccggttcccaacgatcaaggcgagttacatgatcccccatgttgtgcaaaaaagcggttagctccttcggtcctccgatcgttgtcagaagtaagttggccgcagtgttatcactcatggttatggcagcactgcataattctcttactgtcatgccatccgtaagatgcttttctgtgactggtgagtactcaaccaagtcattctgagaatagtgtatgcggcgaccgagttgctcttgcccggcgtcaatacgggataataccgcgccacatagcagaactttaaaagtgctcatcattggaaaacgttcttcggggcgaaaactctcaaggatcttaccgctgttgagatccagttcgatataacccactcgtgcacccaactgatcttcagcatcttttactttcaccagcgtttctgggtgagcaaaaacaggaaggcaaaatgccgcaaaaaagggaataagggcgacacggaaatgttgaatactcatactcttcctttttcaatattattgaagcatttatcagggttattgtctcatgagcggatacatatttgaatgtatttagaaaaataaacaaataggggttccgcg

SEQ ID NO: 245 - DNA, 3909 bp, Artificial Sequence
  Synthetic
aacaccccttgtattactgtttatgtaagcagacagttttattgttcatgatgatatatttttatcttgtgcaatgtacatcagagattttgagacacaaccaattattgaaggcctccctaacggggggcctttttttgtttctggtctcccaagcgcttaacgatcgttggctgaacaaacagacaatctggtctgtttgtattatggaaaatttttctgtataatagattcaacaaacagacaatctggtctgtttgtattatcagcggtcaacgcatgtgctttgcgttctgatgagacagtgatgtcgaaaccgcctctacaaataattttgtttaagctcttcatcacacaggaaagtactagatgagcaaaggagaagaacttttcactggagttgtcccaattcttgttgaattagatggtgatgttaatgggcacaaattttctgtccgtggagagggtgaaggtgatgctacaaacggaaaactcacccttaaatttatttgcactactggaaaactacctgttccgtggccaacacttgtcactactctgacctatggtgttcaatgcttttcccgttatccggatcacatgaaacggcatgactttttcaagagtgccatgcccgaaggttatgtacaggaacgcactatatctttcaaagatgacgggacctacaagacgcgtgctgaagtcaagtttgaaggtgatacccttgttaatcgtatcgagttaaagggtattgattttaaagaagatggaaacattcttggacacaaactcgagtacaactttaactcacacaatgtatacatcacggcagacaaacaaaagaatggaatcaaagctaacttcaaaattcgccacaacgttgaagatggttccgttcaactagcagaccattatcaacaaaatactccaattggcgatggccctgtccttttaccagacaaccattacctgtcgacacaatctgtcctttcgaaagatcccaacgaaaagcgtgaccacatggtccttcttgagtttgtaactgctgctgggattacacatggcatggatgagctctacaaataatgaagagcgcagaggtggttgtgttgcgaaaaaaaaaaaaaacaccctaacgggtgtttttttttttttggtgtccccacgtgtggcgctggagaccgtccaatggcggcgcgccatcgaatggtgcaaaacctttcgcggtatggcatgatagcgcccggaagagagtcaattcagggtggtgaatatgagcccgaaacgtcgtacccaggcagaacgtgcaatggaaacccagggtaaactgattgcagcagcactgggtgttctgcgtgaaaaaggttatgcaggttttcgtattgcagatgttccgggtgcagccggtgttagccgtggtgcacagagccatcattttccgaccaaactggaactgctgctggcaacctttgaatggctgtatgagcagattaccgaacgtagccgtgcacgtctggcaaaactgaaaccggaagatgatgttattcagcagatgctggatgatgcagcagatttttttctggatgatgattttagcatcggcctggatctgattgttgcagcagatcgtgatccggcactgcgtgaaggtattctgcgtaccgttgaacgtaatcgttttgttgttgaagatatgtggctgggtgtgctggtgagccgtggtctgagccgtgatgatgccgaagatattctgtggctgatttttaacagcgttcgtggtctgacagttcgtagcctgtggcagaaagataaagaacgttttgaacgtgtgcgtaatagcaccctggaaattgcacgtgaacgttatgcaaaattcaaacgttgataaggatcctaattggtaacgaatcagacaattgacggctcgagggagtagcatagggtttgcagaatccctgcttcgtccatttgacaggcacattatgcatcgatgataagctgtcaaacatgagcagatcctctacgccggacgcatcgtggccggcatcaccggcgccacaggtgcggttgctggcgcctatatcgccgacatcaccgatggggaagatcgggctcgccacttcgggctcatgagcaaatattttatctgaggtgcttcctcgctcactgactcgctgcacgaggcagacctcagcgctagcggagtgtatactggcttactatgttggcactgatgagggtgtcagtgaagtgcttcatgtggcaggagaaaaaaggctgcaccggtgcgtcagcagaatatgtgatacaggatatattccgcttcctcgctcactgactcgctacgctcggtcgttcgactgcggcgagcggaaatggcttacgaacggggcggagatttcctggaagatgccaggaagatacttaacagggaagtgagagggccgcggcaaagccgtttttccataggctccgcccccctgacaagcatcacgaaatctgacgctcaaatcagtggtggcgaaacccgacaggactataaagataccaggcgtttcccctggcggctccctcgtgcgctctcctgttcctgcctttcggtttaccggtgtcattccgctgttatggccgcgtttgtctcattccacgcctgacactcagttccgggtaggcagttcgctccaagctggactgtatgcacgaaccccccgttcagtccgaccgctgcgccttatccggtaactatcgtcttgagtccaacccggaaagacatgcaaaagcaccactggcagcagccactggtaattgatttagaggagttagtcttgaagtcatgcgccggttaaggctaaactgaaaggacaagttttggtgactgcgctcctccaagccagttacctcggttcaaagagttggtagctcagagaaccttcgaaaaaccgccctgcaaggcggttttttcgttttcagagcaagagattacgcgcagaccaaaacgatctcaagaagatcatcttattaaggggtctgacgctcagtggaacgaaaaatcaatctaaagtatatatgagtaaacttggtctgacagttaccttagaaaaactcatcgagcatcaaatgaaactgcaatttattcatatcaggattatcaataccatatttttgaaaaagccgtttctgtaatgaaggagaaaactcaccgaggcagttccataggatggcaagatcctggtatcggtctgcgattccgactcgtccaacatcaatacaacctattaatttcccctcgtcaaaaataaggttatcaagtgagaaatcaccatgagtgacgactgaatccggtgagaatggcaaaagcttatgcatttctttccagacttgttcaacaggccagccattacgctcgtcatcaaaatcactcgcatcaaccaaaccgttattcattcgtgattgcgcctgagcgagacgaaatacgcgatcgctgttaaaaggacaattacaaacaggaatcgaatgcaaccggcgcaggaacactgccagcgcatcaacaatattttcacctgaatcaggatattcttctaatacctggaatgctgttttcccggggatcgcagtggtgagtaaccatgcatcatcaggagtacggataaaatgcttgatggtcggaagaggcataaattccgtcagccagtttagtctgaccatctcatctgtaacatcattggcaacgctacctttgccatgtttcagaaacaactctggcgcatcgggcttcccatacaatcgatagattgtcgcacctgattgcccgacattatcgcgagcccatttatacccatataaatcagcatccatgttggaatttaatcgcggcctcgagcaagacgtttcccgttgaatatggctcat

SEQ ID NO: 246 - DNA, 7999 bp, Artificial Sequence
  Synthetic
cctagatccttttaaattaaaaatgaagttttaaatcaatctaaagtatatatgagtaaacttggtctgattatttgccgactaccttggtgatctcgcctttcacgtagtggacaaattcttccaactgatctgtgcgcgaggccaagcgatcttcttcttgtccaagataagcctgtctagcttcaagtatgacgggctgatactgggccggcaggcgctccattgcccagtcggcagcgacatccttcggcgcgattttgccggttactgcgctgtaccaaatgcgggacaacgtaagcactacatttcgctcatcgccagcccagtcgggcggcgagttccatagcgttaaggtttcatttagcgcctcaaatagatcctgttcaggaaccggatcaaagagttcctccgccgctggacctaccaaggcaacgctatgttctcttgcttttgtcagcaagatagccagatcaatgtcgatcgtggctggctcgaagatacctgcaagaatgtcattgcgctgccattctccaaattgcagttcgcgcttagctggataacgccacggaatgatgtcgtcgtgcacaacaatggtgacttctacagcgcggagaatctcgctctctccaggggaagccgaagtttccaaaaggtcgttgatcaaagctcgccgcgttgtttcatcaagccttacggtcaccgtaaccagcaaatcaatatcactgtgtggcttcaggccgccatccactgcggagccgtacaaatgtacggccagcaacgtcggttcgagatggcgctcgatgacgccaactacctctgatagttgagtcgatacttcggcgatcaccgcttccctcattttagcttccttagctcctgaaaatctcgataactcaaaaaatacgcccggtagtgatcttatttcattatggtgaaagttggaacctcttacgtgccatttccccgaaaagtgccacctgacgtctaagaaaccattattatcatgacattaacctataaaaataggcgtatcacgaggcagaatttcagataaaaaaaatccttagctttcgctaaggatgatttctggaattcgcggccgcttctagagcgcgaagacttacgaaaatccgcttaacgatcgttggctgttttcagcaggacgcactgacctccctatcagtgatagagattgacatccctatcagtgatagagatactgagcaccagggtgtctcaaggtgcgtaccttgactgatgagtccgaaaggacgaaacacccctctacaaataattttgtttagctcttcaagactaaattcccccgaggtcaataatgcaatctacaccattactgcaaatacaaccacatttccatgtagaggtcattgaaccaaagcaagtctacttgttgggtgaacaagctaatcatgcattgacaggccaattatactgccaaattttgccattgttaaacggacaatacacattggaacaaatcgttgaaaaactagacggagaagtaccacctgaatacattgattatgtgctggagagactagctgagaagggctatctgactgaagcagcacctgaattatctagtgaagtggccgctttctggtctgagctggggattgcacctcctgtcgcggccgaagcattacgtcaacctgtgactttaacacctgttggaaacatcagcgaagtaacagtagcagccttaaccacagccctacgtgatatcggtatttccgttcaaacacctacagaagctggatcgccaactgcattgaacgttgtacttaccgatgattatctccaaccagaactcgctaagatcaataagcaagccttagaaagtcaacaaacttggctacttgtcaaaccagttggctccgtgttatggttgggtccggtattcgtgccaggaaaaacaggttgctgggattgtttggctcacagattaagggggaatagagaggtagaggcctctgtattgagacaaaaacaagctcaacaacaacgtaatggacaaagcgggtctgtaataggatgccttcccacggctagagcgacactgccctcaacactccaaactgggctgcagttcgctgctaccgaaattgctaaatggatagttaagtatcatgttaatgccacagcgcctggcaccgtattcttccctacattggatggtaagataattacgctaaatcactccatactggatttgaagtcacatattctgatcaagcgttctcaatgtcccacctgtggtgacccaaaaatcttacagcaccgtggtttcgaacctttaaaacttgagtcaaggcctaaacagttcacctcagacggcggacatcgtggtactacccctgaacaaactgtccagaaatatcaacatttaatctcgcctgttaccggtgtagttactgaattggtcaggataactgatccggccaatccactagttcacacatatagagctggtcatagcttcgggagcgctacatcgctgagagggctgcgtaataccttaaagcataagagttcaggtaagggtaagactgattctcaaagtaaagcctcgggcctgtgtgaggcggtagaacgttactcaggaatctttcaaggtgacgaaccgagaaaacgcgccacattggctgaattgggagatttggcaattcaccctgagcaatgcttgtgtttttccgacggtcagtacgctaatagagaaactttaaacgaacaggcaacggtggcacatgattggatacctcaacgttttgatgcatcacaagctattgaatggactccagtctggtccctaactgaacagacccataaatatttgcccaccgcattgtgttactaccattatcctctacccccagaacacagattcgcacgtggagattcgaatggtaatgctgccggaaatacgttggaagaggctatactccaaggcttcatggaattagtcgagagagatggtgtggctttatggtggtataacaggctacgcagacccgctgtagacttaggctcatttaacgagccatacttcgttcagttgcaacaattctacagagaaaacgatagagatttgtgggttttggacttgacagctgatttaggtatcccggctttcgcgggcgtttctaatagaaaaactggtagttcggagaggttgatattaggattcggtgcacacctcgatcctactattgcaattctgagagcagttacagaagttaaccagattggccttgaattagataaagttccagacgagaaccttaagagcgacgcaacagattggctaattactgaaaaattagctgaccacccttatttgttaccagatacaactcaacctctaaaaactgctcaagattatcctaaaaggtggtctgacgatatatacacggacgtaatgacttgcgttaatattgctcaacaagcaggacttgaaactctagttattgatcaaacacgtccggacattggtttgaatgttgttaaggtgacagtcccggggatgaggcacttttggtcaagatttggagaggggaggctttatgacgtgcccgtcaaattaggttggcttgacgaacctttgaccgaagcgcaaatgaaccccacgccgatgcctttttaataatgaagagctaagcgttgaacgctacacggactctaactaaaaaggcctcccaaatcggggggccttttttattgataacaaaacggcatgcgcatggacgactacggatgcgggcaaggtgccgcttaacgatcgttggctgccctttgtgcgtccaaacggacgcacggcgctctaaagcgggtcgcgatctttcagattcgctcctcgcgctttcagtctttgttttggcgcatgtcgttatcgcaaaaccgctgcacacttttgcgcgacatgctctgatccccctcatctgggggggcctatctgagggaatttccgatccggctcgcctgaaccattctgctttccacgaacttgaaaacgctcagtcataagtctgggctaagcccactgatgagtcgctgaaatgcgacgaaacttatgacctctacaaataattttgtttaagagccaccatttataaggagaacctaccgatgaccaaaaagtatcggcgtgtatcctacgcagtgtgggaaatcaccctgaaatgcaatctggcatgctctcattgtggcagccgcgccggccaagcccgtacgaaagagctgagtaccgaagaagcgttcaacctggtccgccagctggccgacgtgggcattaaggaagtcaccctgatcggtggtgaagcctttatgcgttcggattggctggaaatcgcgaaagccgtcactgaagccggcatgatctgtggcatgaccacagggggcttcggggtcagtctggaaacggcgcgtaaaatgaaagaagcgggcattaaaacggtgagcgttagcattgacggtggtattcctgaaacccacgaccgccagcgcggtaaaaagggtgcgtggcatagtgcattccggactatgagccatctgaaagaagtcgggatctacttcggttgcaacactcaaatcaatcgtttatcggcgtcagaattcccgattatctatgaacgtattcgcgatgctggggcacgtgcgtggcaaattcagctgacggttccgatgggcaacgccgcggataacgcagatatgctgctgcaaccgtatgaattgctcgacatctatccgatgttagcccgcgttgccaaacgtgcgaaacaggaaggcgtgcgtattcaggcaggtaacaacatcgggtactatggaccgtatgagcgtctgctgcgtggcagcgacgaatggacgttttggcaaggatgtggtgcgggccttaacaccctcggcatcgaagccgacggcaaaatcaaaggctgtccatccctgccgaccgccgcgtacaccggcggtaacattcgcgatcgcccgctgcgggaaatcgtcgaacagaccgaagaactgaaatttaacttaaaagctggtacagaacaaggtacggaccatatgtggggcttttgtaaaacctgcgaattcgcggaactctgtcgcggcggatgcagctggactgcgcatgtgttctttgaccggcgcggcaataatccgtactgccaccatcgggctctgaaacaagcccaaaaagacattcgcgaacgcttttatttaaaagtgaaagcaaagggcaacccgttcgacaatggtgaatttgttatcattgaagaaccttttaacgctccgttacccgagaatgacctgctgcactttaacagtgatcacattcaatggccagaaaactggcaaaatagtgaaagcgcgtacgcattggccaagtaataaatataaagttaaggagttgcacatgaacagtaatcagatccctaacaaagttgcaaccgcggcacagaaatctgacgacagcagcagcgtattaccgcgccaggggtggcaagacaaacaagcctttattaaggcactcattaaagccaaacagtctctcgaaattgccgaaattagcaactttttaacctaataaagaattacctaccgcggtcgctcggtaccaaattttcgaaaaaagacgctgaaaagcgtcttttttcgttttggtcccacgtggcaagcgcttaacgatcgttggctgaacaaacagacaatctggtctgtttgtattatggaaaatttttctgtataatagattcaacaaacagacaatctggtctgtttgtattatcagcggtcaacgcatgtgctttgcgttctgatgagacagtgatgtcgaaaccgcctctacaaataattttgtttaagctcttcaagagcattccataaggagaaattttatgacgagaaccaacaccggctatcgttatcgcgcgttcggcctgcgcatagactcagatattccgctgccagaattaggggacggtacgcgccctgatggtgacgcggatctgacggtcgtccggtgtggggaagcggagccggaatgggctgaaggtggtggcgggggtcgtctgtatgccgctgaaggcattgtatcttttcgcgtgccgcagacggcagcgttccgtattactaatggaaatcgcatcgaggtgcatgcctactcgggggctgatgaggatcgaatacgcctgtacgtgttagggacctgtatgggagcgctgttactgcaacgtagaatcttaccgcttcatggttcggtcgtcgcccgtgatggtcgtgcgtatgccatagttggcgaaagcggagcgggcaaatccacgatgagtgcagcacttctcgaacgtggattccgcctcgttacggatgacgtggccgccatcgtgttcgatgagcgtgggaccccactggttatgccggcttatccacagcaaaaactgtggcaggattccctggaccgtctgcaaattgcgggctcgggccttcgtccgctgttcgaacgcgaaacgaaatacgctgtacccgcggatggggcattctggcccgaaccggttccattggtgcacatttacgaactggttcatagcgatggtcaaacgcctgaactgcagccgattgccaaattagagcgttgctataccttgtatcgccacacatttcgtagaagcctgatcgtccccagcggcttaagcgcctggcattttgaaacggcagtgaaacttgcggagaaaacggggatgtaccgtcttatgcgcccggccaaagttttcgcggctcgcgaatctgctcggctgattgaaactcacgccgatggtgaagtgtcacgttaataatgaagagcggatgagctctacaaataagcagaggtggttgtgttgcgaaaaaaaaaaaaaaacaccctaacgggtgtttttttttttttggtgtccccacgtgtggcgctttacaaagtcttcctgtactagtagcggccgctgcagtccggcaaaaaagggcaaggtgtcaccaccctgccctttttctttaaaaccgaaaagattacttcgcgttatgcaggcttcctcgctcactgactcgctgcgctcggtcgttcggctgcggcgagcggtatcagctcactcaaaggcggtaatttaataagatgatcttcttgagatcgttttggtctgcgcgtaatctcttgctctgaaaacgaaaaaaccgccttgcagggcggtttttcgaaggttctctgagctaccaactctttgaaccgaggtaactggcttggaggagcgcagtcaccaaaacttgtcctttcagtttagccttaaccggcgcatgacttcaagactaactcctctaaatcaattaccagtggctgctgccagtggtgcttttgcatgtctttccgggttggactcaagacgatagttaccggataaggcgcagcggtcggactgaacggggggttcgtgcatacagtccagcttggagcgaactgcctacccggaactgagtgtcaggcgtggaatgagacaaacgcggccataacagcggaatgacaccggtaaaccgaaaggcaggaacaggagagcgcacgagggagccgccagggggaaacgcctggtatctttatagtcctgtcgggtttcgccaccactgatttgagcgtcagatttcgtgatgcttgtcaggggggcggagcctatggaaaaacggctttgccgcggccctctcacttccctgttaagtatcttcctggcatcttccaggaaatctccgccccgttcgtaagccatttccgctcgccgcagtcgaacgaccgagcgtagcgagtcagtgagcgaggaagcggaatatatcctgtatcacatattctgctgacgcaccggtgcagccttttttctcctgccacatgaagcacttcactgacaccctcatcagtgccaacatagtaagccagtatacactccgctacgattatcaaaaaggatcttca

SEQ ID NO: 247 - protein, 448 aa, Artificial Sequence
  Synthetic
MFIEQMFPFINESVRVHQLPEGGVLEIDYLRDNVSISDFEYLDLNKTAYELCMRMDGQKTAEQILAEQCAVYDESPEDHKDWYYDMLNMLQNKQVIQLGNRASRHTITTSGSNEFPMPLHATFELTHRCNLKCAHCYLESSPEALGTVSIEQFKKTADMLFDNGVLTCEITGGEIFVHPNANEILDYVCKKFKKVAVLTNGTLMRKESLELLKTYKQKIIVGISLDSVNSEVHDSFRGRKGSFAQTCKTIKLLSDHGIFVRVAMSVFEKNMWEIHDMAQKVRDLGAKAFSYNWVDDFGRGRDIVHPTKDAEQHRKFMEYEQHVIDEFKDLIPIIPYERKRAANCGAGWKSIVISPFGEVRPCALFPKEFSLGNIFHDSYESIFNSPLVHKLWQAQAPRFSEHCMKDKCPFSGYCGGCYLKGLNSNKYHRKNICSWAKNEQLEDVVQLI

SEQ ID NO: 248 - protein, 45 aa, Artificial Sequence
  Synthetic
MDSLLSTETVISDDELLPIEVGGTAELTEGQGGGQSEDKRRAYNC

SEQ ID NO: 249 - protein, 243 aa, Artificial Sequence
  Synthetic
MPELPRFATAPRHVRALDFGHVLVLIDYRSNHVQCLLPAAAAHWTATARTGRLDTMPAALATQLLTSALLVPRPTATPWTAPVAAPPAPPSWGGSEHPAGTSRPRARHRHSTTAAAALACVLAIKAAGPTRYAMQRLTTVVKAAASTCRRPATPAQATAAALAVRQACWYSPARTACLEESAATVILLATRRLSSTWCHGVAPDPIRLHAWVETEDGTPVAEPASTLAYTPALTIGGHHQHQP

SEQ ID NO: 250 - protein, 606 aa, Artificial Sequence
  Synthetic
MIFGGFSTTREVRQRPGNAEFIATDSPIWRLGRSPARCVAADHGQRRLVVLGECGATDGELSRLATAGLPTDITWRWPGVYVVVEEQPERTVLHTDPAAALPVYATPWQGGWAWSTSARILARLTEAPIDGQRLACSVLAPSVPALSGTRTFFAGIEQLALGSRIELPVDGSRLRVTVRWRPDPVPGEPYHRLRTALTEAVALRVNRAPDLSCDLSGGLDSTSLAVLAAVCLPESHHLNAITIHPEGDESGADLRYARLAAAHHGRIRHHLLPLAAEHLPYTEITAVPPTTEPAPSTLTRARLAWQLDWMRQHLGSRTHMTGDGGDSVLFQPPAHLADLLRHRQWRRTLSESLGWARLRHTSVLPLLRGAATLARTSRRSGLQDLARALAGAGQQGDGRGNVSWFAPLPLPGWATPTARRLLLDAADEAISTADPLPGLDTSLRVLIDEIREVARTAAADAELADAHGTTLHNPFLDPRTIDAVLRTPIAHRPAVHSYKPALGHAMQDLLPGAVARRSTKGSFNADHYAGMRANLPALTALADGHLADLGLLEPTRFRSHLRQAAAGIPMPLAAIEQALSAEAWCHAHHATPSPAWTTQPPEHPHA

SEQ ID NO: 251 - protein, 202 aa, Artificial Sequence
  Synthetic
MSTSPEQTLWISTDTCGLGPYRADLVDTYWQWEQDPTLLVGYGRQSPQSLEARTEGMAHQLRGDNIRFTIYDLCSSTPTPAGVATLLPDHSVRTAEYVIMLAPEARGRGLGTTATQLTLDYAFHITNLRMVWLKVLAPNTAGIRAYEKAGFRTVGALREAGYWLGKVCDEVLMDALAKDFTGPSAVHAALTGASGRQLRRAP

SEQ ID NO: 252 - protein, 100 aa, Artificial Sequence
  Synthetic
MPENRQEDLNAQAVPFFARFLEGQNCEDLTDEESEAVSGGKRGQTRKYPSDCEDGNGVTGKLRDEDIAVTLKYPSDNEDNGGGEIVTLKFPSDDDDQPVG

SEQ ID NO: 253 - protein, 323 aa, Artificial Sequence
  Synthetic
MNVLIITHSHDNESISLVTQAIESQGGKAFRFDTDRFPTEVQLDIYYSNTEKCVLVADDQKLDLNEVTAVWYRRIAIGGKIPPTMDKQLRQASIQESRATIQGMIASIRGFHLDPVPNIRRAENKQLQLQVARKIGLDTPRTLTTNNPQAVKEFAAECQQDVITKMLSSFAIYDEKGGEQVVFTNPVKSEDLENLEGLRFCPMTFQEKIAKVLELRITIVGKSILTAAVNSQALDKSRYDWRKQGVALLDAWQTHTLPQDVADKLLQLMAHFGLNYGAIDVILTPDNRYVFLEVNPVGEFFWLERCPGLPISQAIAKVLLSHI

SEQ ID NO: 254 - protein, 51 aa, Artificial Sequence
  Synthetic
MHTPIISETVQPKTAGLIVLGKASAETRGLSQGVEPDIGQTYFEESRINQD

SEQ ID NO: 255 - protein, 209 aa, Artificial Sequence
  Synthetic
MYELNDGVGLALVDQHPIFLDLKTDRYLSLSPDGAAVLLGAAPATKESPLFLGLESIGLVKNGPSGLKPCQIAVATGSAPPRKVQFESLSLLLLRLIRARLDQRALLKRVTDLKKAGTIAQTKNRDCALSLLGSVETEAKACRTLLSSTDKCLPDAFAIATHLRRRGVDAKLVFGVRLPFAAHAWVQVDDIVVGDRPDRILAFTPILVV

SEQ ID NO: 256 - protein, 572 aa, Artificial Sequence
  Synthetic
MRYVASFFVRGHVSTPALRHPEPKGFAYAKVSGGLSVWSDAPIRHRAPLITVGAVFDRASFKGLDCDLSGLRQDGLNTLKAETFGPYLALEVADNGTLRVYRDPSGGAPCYYLQTEDGFWLASDADLLFTHSGVHPSVSLPGLIEHLRRPEFQNEGTCLNVKQVRPGEQVDLSLSGEVRACLFPPASSLRPPELHRAYDDIKAELRALILRSIKAYASDFPHVVVSFSGGLDSSVVAAGLAQTSTKVLLHTFKGPDAKGDETAFAAECAAYLGLSLEIDTLSIDDVDLSATISPHLPRPSTSFFLPSLLRGFSTSSQTRTGGAIFSGNGGDSVFCFMHSATPLADLMCRPSGLTPFMQTWADVQKLTRASATEVLRRALKTAMARGYIWPESNLLLSRDTSSSRLTPDSVLSSLEGILPGRLRHLALIRRAHNTFEPFAPWRTPPVVHPLMAKPIQAFCLSLPSWMWVSGGKDRSLVRDAFEGLLPDSVRLRKSKGSPAGFLHALYRAKGRQMIERIRHGYLRREGIIDISTGPDALFSEGFRNPRVMHRFFELAATEVWIDHWRNWRRPRT

SEQ ID NO: 257 - protein, 18 aa, Artificial Sequence
  Synthetic
LKIRKVKIVRAQNGHYTN

SEQ ID NO: 258 - protein, 612 aa, Artificial Sequence
  Synthetic
MEGLYQLKVHSRIHKLQNNIAIGSMPPHALIIEDAPEYLSNVLRFFSSKKTIKEAEVYLSDNTNLSSNEINLLLGDLIENEIIVKQNYDSNNRYSRHSLYYEMIDANAENAQKILAEKTVGLVGMGGIGSNVAMNLAAAGVGKLIFSDGDTIELSNLTRQYLYKEDQVGLSKVESAKEQLQLLNSEVELIPVCESISGEELFDNHFSECDFVVLSADSPFFVHEWINNAALKYGFSYSNAGYIETYGAIGPLVIPGETACYECYKDKGDLYLYSDNKEEFSVNLNESFQAPSYGPLNAMVSSIQANEVIRHLLGLKTKTSGKRLLINSEIYKIHEENFEKKNNCLCSDIKGEKLSKNTLNSDKELHEVYIEERESDSFNSILLDKTMSKLVKINKEETKILDIGCATGEQALYFANKGAKVTAVDISDDMLKVLDKKASNINAGSIKTMRGNIESIEVNDTFNYIVCNNILDYLPEIDRTLRKLNMFLKNDGTLIVTIPHPVKDGGGWRKDYYNGKWNYEEFILKDYFNEGLIEKSREDKNGETVIKSIKTYHRTTETYFNSFTDAGFKVVSLLEPQPLSTVSETHPILFEKCSRIPYFQVFVLKKEDRHAI

SEQ ID NO: 259 - protein, 44 aa, Artificial Sequence
  Synthetic
MGPVVVFDCMTADFLNDDPNNAELSALEMEELESWGAWDGEATS

SEQ ID NO: 260 - protein, 88 aa, Artificial Sequence
  Synthetic
MTNEEIIVAWKNPKVRGKNMPSHPSGVGFQELSINEMAQVTGGAVEQRATPTLATPLTPHTPYATYVVSGGVVSAISGIFSNNKTCLG

SEQ ID NO: 261 - protein, 81 aa, Artificial Sequence
  Synthetic
MTNEEIIVAWKNPKVRGKNMPSHPSGVGFQELSINEMAQVTGGAVEQRATPATPATPWLIKASYVVSGAGVSFVASYITVN

SEQ ID NO: 262 - protein, 1018 aa, Artificial Sequence
  Synthetic
MIKNVNLKEAIKGLTVSERYDTLKNSGVNLNLNISALEEWRNRKNLLADEDFTEMLTVLEYDPVYFSHAINENIEEHIDIYKSKILGENWFIVLNDILDELDNPIEYKKEMNHSYLLRPFLLYAEKEMNKYIVNRKELLPVEPQVIQQIMENLASKLFAVSVKSFVLELNISKLKDELAGETPDERFHSFIRLMGEKTRLVDFYNEYIVLSRILVNITILFVNNIIELFERLQESKLDIVKKLGVQEEFKISNISIGEGDTHQQGRSVIVLTFVSGKKVVYKPKNLKVVSAYNSLIDWINNKNNILKMPSYNTLIYDDFVIEEFVEKRDCKSIEEVKKYYIRYGQILGIMYILNGNDFHMENLIASGEYPIIVDLETLLQNIINFKNKPSADLITTKKMLNLVNSTLLLPEKLLKGDITDEGIDMSALAGKEQHLERREYQLKNLFTDNMVFDLEKVKIEGANNIPKLNGENVDYSTYIDEIVVGFENICNLFIQYRDELLHSGILEEFKDVKVRHVLRNTVVYAKMLANTYHPDYLRDSLNREQVLENIWVHPFERKEFIKSEMEDILNNDIPIFFSYASSKDIIDSNGKLHKNVMEISGYERFTTKLKELNPFLIEQQVSVINIKTGRYGDKKFEKNYSVRDVATEKKDNPIDFLQEAMNIGDKILEHAIICDETKTISWLTINNHHDKNWEIGPISGEFYDGLAGISLFYHYLYKKSHNVEYKKIRDYAFNMAKVKALSLKYDSGLTGYASLLYTAHKIVQDEPRKQYKDVINEVFKYIDESKVVTAKYNWLHGTASIIHVLLNLYEDSRDMAYLTKCIQYGKYLVKQIKEHKDMLAPGFSQGISSVIMVLVRLSKKCEVEEFLELALELMEMERNKLGNLSESNWLNGLVGIGLSRIKLKGLDSNLQVDNDIELVLDGVMNSLYSKDDTLSCGNSGTVELFLSLFEQTKKKEYLDMAKAICGKMIEESRISFEYQTKSLPGLELVGLYSGLAGIGYQFLRISDVEDIASIATLD

SEQ ID NO: 263 - protein, 47 aa, Artificial Sequence
  Synthetic
MVRFLAKLLRSTIHGSNGVSLDAVSSTHGTPGFQTPDARVISRFGFN

SEQ ID NO: 264 - protein, 329 aa, Artificial Sequence
  Synthetic
MQPDLEVVDVRRGESFKAWSHGYPYRTVRWHFHPEFEVHLIVETTGQMFVGDYVGGFGPGNLVLMGPNLPHNWVSDVPEGKTVAERNLVVQFGQAFVSRCEDSLTEWRHVETLLADARRGVQFGPRTSEAIKPLFAELIHARGLRRIVLFLSMLQILVDATDRELLASPAYQADPSTFASTRINHALAYIGKNLANELRETDLARLAGQSVSAFSHYFRRHTGLPFVQYVNRMRINLACQLLMDGDASVTDICFRSGFNNLSNFNRQFLAVKGMSPSRFRRYQALNDASRDASEAAAKRGAGIAGAPAIVPAAQARGEARPIPEVLLSG

SEQ ID NO: 265 - protein, 315 aa, Artificial Sequence
  Synthetic
MMLTASSTPASGNPAARALRAAAFALALGGACVAHAAPLRIGMTFQELNNPYFVTMQKALNEAAASIGAQVIVTDAHHDVSKQVSDVEDMLQKKIDILLVNPTDSTGIQSAIVSAKKAGAVVVAVDANANGPVDSFVGSKNFDAGAMSCEYLAKAINGGGEVAILDGIPVVPILERVRGCRAALAKFPNVKIVDVQNGKQERATALTVTENMIQAHPKLKGVFSVNDGGSMGALSAIEASGKDIRLTSVDGAPEAVAAIQKPNSKFIETSAQFPRDQIRLAIGIGLAKKWGANVPKAIPVDVKLIDKGNAKTFSW

SEQ ID NO: 266 - protein, 77 aa, Artificial Sequence
  Synthetic
MTASILQSVVDADFRAALIENPAAFGASTAVLPTPVEQQDQASLDFWTKDIAATEAFACKQSCSFGPFTFVCDGNTK

SEQ ID NO: 267 - protein, 327 aa, Artificial Sequence
  Synthetic
MALKTCEEFLRDALDPDRFGREMKAVTEIPEIVKLGHRHGYGFTAEEFLTKAMSFGAPPAGAAAPGESASVPGQNGSSPGHAARAAMAGPEAGATSFAHYEYRLDELPEFAPVVAELPKLKVMPPSVGPDRFAARYRDEDMRTISMSPADPAYQAWHQELAGRGWRDAEDTAAAPDAPRRDFHLLNLDEHVDYPGYEEYFAAKTRVVAALENLFGGDVRCSGSMWYPPSSYRLWHTNADQPGWRMYLVDVDRPFADPDRTSFFRYLHPRTREIVTLRESPRIVRFFKVEQDPEKLFWHCIANPTDRHRWSFGYVVPENWMDALRHHG

SEQ ID NO: 268 - protein, 39 aa, Artificial Sequence
  Synthetic
MTPIQSKFCLLRVGSAKRLTQSFDVGTIKEGLVSQYYFA

SEQ ID NO: 269 - protein, 40 aa, Artificial Sequence
  Synthetic
MTQVSPSPLRLIRVGRALDLTRSIGDSGLRESMSSQTYWP

SEQ ID NO: 270 - protein, 212 aa, Artificial Sequence
  Synthetic
MPLWLAQDVHAVALDEDIVVLDAVSDAYLCLVGASALISLGSERSVSADPVAAETLREAGLVGPHPSGATRPIPPKPTIDLPDAARQAQGRELRAAAWAGAATAIDFRRRSFRQLLARAGQRPPGQAAAPADEVLAAAAVFMRLRPWSPVGGACLMRSYYLLRHLRILGFDADWIIGVRTWPFMAHCWLQVGAVALDDDVERLTAYTPILAV

SEQ ID NO: 271 - protein, 583 aa, Artificial Sequence
  Synthetic
MGDYLALYWPRGMPGVAADAMRAAIEAEGAWTLAFEAYQLVVYVKGPRAPKVRALPDQGGVVIGELFDTAATREGRVQDFPIALIKDVAAQDAARILATHAWGRYVAVLKAGDRPPWIFRDPSGAVECLAWVRDEVTIISSDVAAQRAWSPDRLAIDWSGLGRVLARGNLWGEICPLAGVTAIAPGTARCDLGDAALSLWRPGDHARRSRHDVSPRDLARVVDASVAALARDRSAILVEISGGLDSAIVATSLARCGAPVVAGINHYWPEPEGDERRWAQDIADRCGFRLIAGQRQRLLLDEAKLLRHAQGPRPGLNAQDPDLDHDLAEQAKALGADALFSGQGGDGVFYQMANAALAADILMGKPAPMGRAASLAAVARRARATVWSLCGQAMFPSRAFAAGMPPPSFLSAGLAPPPVHPWIADQRGVSPAKRIQIRGLTNIQCAFGDSLRGRAADLLYPLMAQPVMELCLSIPAPLLAVGALDRPFARAAFADRLPPRSLVRRSKGDVTVFFSKSLAASLPALRPFLLDGRLAEQGLIDRAKLEPLLHPEPMIWRDSVGEVMLAAYLEAWVRAWEAKLRVS

SEQ ID NO: 272 - protein, 38 aa, Artificial Sequence
  Synthetic
MNTLKTRLIRFGSAKRLTRAGTGVLLPETNQIKRYDPA

SEQ ID NO: 273 - protein, 36 aa, Artificial Sequence
  Synthetic
MTTPKFRLIRLGSAKRLTRSGIGDVFPEPNMVRRWD

SEQ ID NO: 274 - protein, 225 aa, Artificial Sequence
  Synthetic
MTLTWRPGVHAVMVEDDLVLLDEAADAYVCLLDGAKVVSVRADGALSFNPPHAAEDMIAGGLVEPSSSAAASANPPAKLPCTPLARLSRPRHVKVRPAEAALFLIQAWGVARAVRRWPMARLLEALRGDRAAEPAKGRRSMAEACAVFDALLAWSPFDGECLFRSVLRRRFLMALGHSPDLVIGVRTWPFRAHCWLQSGVDALDDWPERLCAYRPILAASASQGR

SEQ ID NO: 275 - protein, 568 aa, Artificial Sequence
  Synthetic
MSYLLMTWPPGQPSVEADALHAAFNGQGGWSLVLERFCLRVYVRGAAAPAVTLTPKGGVLIGEMFDRAATETGAVAAYDLSRLGDDDGMAVARRVVDEAWGRYVLVLPVKERRPVVLREPLGALDALIWRKGDVWCVGADVPPGLEPKDLGVEETRLTHLIAEPDLASASLPLTGVAAVMPGTAVDETGQVHRLWTPARFARSPRTDAWTAAERIPLVTRACIAALSANRSGILCEISGGLDSAIVATSLKAEGAKISSGINFHWPQAEADERPYARAVAKSVRTRLQVVASRVAPVDPETFDEIVVARPSFNAIDPVYDTVLAQRLIQGGEGALFTGQGGDAVFYQMPAPQLSLDLLARGPRRRGLMGLSRRTNRSVWSLLRMGLRAPVRATFPYGARGADRPPMHPWLEDARGVGAAKRIQIEALVANQAVFEASRRGAAAHLVHPLLSQPLVELCLSTPAAVLAGAEQDRAFVRSAFRAQLPRLVLDRQSKGDLSVFFAKGVARSLPGLRPRLLEGRLAARGLIDVEALSQAMQPEAMIWRDGSAEILCLAVLESWLRSWEARGA

SEQ ID NO: 276 - protein, 44 aa, Artificial Sequence
  Synthetic
MQRIIDETTDGLIELGAASVQTQGDVLFAPEPGVGRPPMGLSED

SEQ ID NO: 277 - protein, 44 aa, Artificial Sequence
  Synthetic
MERIEDHIDDELIDLGAASVETQGDVLNAPEPGIGREPTGLSRD

SEQ ID NO: 278 - protein, 44 aa, Artificial Sequence
  Synthetic
MEFEGIPSPDARIDLGLASEETCGQIYDHPEVGIGAYGCEGLQR

SEQ ID NO: 279 - protein, 219 aa, Artificial Sequence
  Synthetic
MRVAVPDHLAYCVKQGGVTFLDVRGDRYFGLPPVLEHAFVAIAEADFLLKEPNSLLEPLEALGVLVRGQARRADLTIPSANLSWVDEVSPTPPRLDPASLVATVTSVIRTRLSQKSKSLQALLEEVRTRRPGSPAHNWQLMRRLTAGFRASRAWAPIEPICLLDSLALLDFLHRRGLYPHIVFGVIRQPFAAHCWVQADDVVLNDRLDHVGEYTPILVV

SEQ ID NO: 280 - protein, 579 aa, Artificial Sequence
  Synthetic
MEDYVVLIWPALAEAPARDLIRRLPKLKTVIETSGLVVLRPENGAGLRVGGNGVVLGSVFRTGGDRETVAEFSESEASAIATSRGQQLVTEFWGGYLAVLGDASRSEVMVLRDPSGAMPAYCLVHGEVQIICSRLEVLEDAGLGQQALNWDVVAQLLAFPNLRGRSTGLKGVEELLPGCRLTFTGGLKTETLTWNPWLFARPSAQAPERGVAATAVRQAVEVSVRKWADQSSPVLLELSGGLDSSIIACCLDEPRTAATFVNFVTPTAEGDERGYARLVAKAADKQLIEQDIRADEVDVTRPRPGRHPRPASQALLQPLEQACAELAPQLGARSFFSGLGGDNVFCSIATASPAADALLTSGLGRQFWAAIGDLCARHNCTVWAALSATLKKLLRSDRRLVIKPNLDFLSFREDAIDRPDHPWLEVAADRLPGKREHVASILLAQGFLDRYEHAQVAAVRFPLLTQPVMEACLRVPTWMANHQGRNRAVARDAFFDRLPPRVRDRQTKGGLNAFMGVAFERNRQALARHLLDGRLVQRGLIDAVAIKSALASPVLEGGAMNRLLYLADVESWVRSWEDV

SEQ ID NO: 281 - protein, 299 aa, Artificial Sequence
  Synthetic
MKEIVKQNISNKDLSQLLCSFIDSKETFSFAESAILHYVVFGGENLDVATWLGAGIEILILSSDIMDDLEDEDNHHALWMKINRSESLNAALSLYTVGLTSIYSLNTNPLIFKYVLRYVNEAMQGQHDDITNKSKTEDESLEVIRLKCGSLIALANVAGVLLATGEYNETVERYSYYKGIVAQISGDYHVLLSGNRSDIEKNKQTLIYLYLKRLFNNASEELLYLFSHKDLYYKALLDREKFEEKLIQAGVTQYISVLLEIYKQKCFSTIEQLNLDKEKKELIKESLLSYKKGDTRCKT

SEQ ID NO: 282 - protein, 55 aa, Artificial Sequence
  Synthetic
MQDLINYFLNYPEALKKLKNKEACLIGFDVQETETIIKAYNDYYRADPITRQWGD

SEQ ID NO: 283 - protein, 73 aa, Artificial Sequence
  Synthetic
MSELSMEKVVGETFEDLSIAEMTMVQGSGDINGEFTTSPACVYSVMVVSKASSAKCAAGASAVSGAILSAIRC

SEQ ID NO: 284 - protein, 66 aa, Artificial Sequence
  Synthetic
MSESNMKKVVGETFEDLSIAEMTKVQGSGDVMPESTPICAGFATLMSSIGLVKTIKGNVKSFSVLI

SEQ ID NO: 285 - protein, 1003 aa, Artificial Sequence
  Synthetic
MNDINKNKTKTINEKIKIFTKEEVIDISYFEEWRSVRTLLNENYFKIMLEEMNISKNQFSYALQPLNDEFKLHTNVKNEEWIKCFNRVINNFNYKNINYKVGLYLPIQPFSVYLQEKLKEILKKLNNIKINDKIIDAFIEAHLIEMFDLVGKVIALKFEDYKQINFLKNTNNGTRLEEFLRSTFYSRKSFLKLFNEFPVLARVCTVRTIYLINNFSAIIQNINSDYLEIQEFLNVDFLNLTNITLSTGDSHEQGKSVSILYFDEKKLIYKPKNLKISEIFESFIDWYTNVSNHKLLDLKIPKGIFKDDYTYNEFIEPNYCENKREIENYYNRYGYLIAICYLFNLNDLHVENVIAHGEYPVIVDIETSFQVPVQMEDDTLYVKLLRELELESVSSSFLLPTNLSFGMDDKVDLSALSGTMVELNQQILAPVNINMDNFHYEKSPSYFPGGNNIPKNNKSVTVDYKKYLLNIVTGFDEFMKYTQENQLEFIEFLKKFSDKKIRVLVKGTEKYASMIRYSNHPNYNKEMKYRERLMMNLWAYPYKDKRIVNSEVQDLLFNDIPIFYSFPNSRDLIDSRGLVYKDYLPVTGLQKAIDRVKDTSVKSLFDQKLILQSSLGLWDEILNKPVQKKELLFEKQNFNYVKEAINIAELLIGYLIETDDQSTMLSIDCSEDKHWKIVPLDESLYGGLSGIALFFLDIYKITKDEKYFNYYDKIISTAIKQCKATIFSSSFTGWLSPIYPLILEKKYFGTMKDKKFFDYTMEKLSNMTEEQINNMDGMDYISGKAGIVKLLISAYRESKNNENIGLALSKFSNDLIQNIGTGKVSELQNVGLAHGISGIMVVVASLDTFKSEYIREQLAIEYEMFCLREDSYKWCWGISGMIQARLEILKLSPECVDKKELNLLIKRFKNILNQMINEDSLCHGNGSIITTMKMIYMYTQDTEWNSLINLWLSNVSIYSTLQGYSIPKLGDVTIKGLFDGICGIGWLYLYSNFSIENVLLLEV

SEQ ID NO: 286 - protein, 42 aa, Artificial Sequence
  Synthetic
MTKKNATQAPRLVRVGDAHRLTQGAFVGQPEAVNPLGREIQG

SEQ ID NO: 287 - protein, 37 aa, Artificial Sequence
  Synthetic
MTKTHRLIRLGDAQRLTQGTLTPGLPEDFLPGHYMPG

SEQ ID NO: 288 - protein, 37 aa, Artificial Sequence
  Synthetic
MTSRFQLLRLGKADRLTRGALVGLLIEDITVARYDPM

SEQ ID NO: 289 - protein, 216 aa, Artificial Sequence
  Synthetic
MDLWLSAGVYAVMIDDDVVFLDVATNAYFCLPAVGSVLALEGRSLRVAARELAEDLIQAGLASAAAAIEPPPSTPAPVRTARAVLEALPARERPRPRLAHWRQAIMAGLASRAAERRPFAQRLPPPSTGVSPPASEGLLADLDAFRRLQPWLPFDGACLFRSQMLRDYLLALGHRVDWIFGVRTWPFGAHCWLQAGDLVLDDEAERLIAYHPIMVR

SEQ ID NO: 290 - protein, 617 aa, Artificial Sequence
  Synthetic
MGYAALTYPGGLAAAAFDEMVEALIDAGWTLALRAFRLAVLTDGQAPAVSPLMGRGGVAGVLIGEAFDRRATLGGAVARAALDGLADIDPLEAGRHLIETAWGGYVGMWIGRAEAGPTLLRDPSGALEALAWRRDGVTVMSARPLTGRAGPADLAIDWPRIVQILADPISAALGPPPLTGLATIDPGAAVHGADGQERSVLWTPAAVVRGARHRPWPSRQDLRRTIDATVAALASDAGPIVCEISGGLDSAIVATSLAASGLGPQLTVNFYGDQPEADERGYAQAVAERIGAPLRTLRREPFAFDETVLAAAGQAARPNFNALDPGYDAGLVGALEAIDARALFTGHGGDTVFYQVAASALAADLLGGAPCEGSRRARLEEVARRTRRSIWSLAWEAFSGRPSTVSIEGQLLRQEAERIRRVGLTHPWVGGLSSVTPAKRQQIRALVSNLNAHGATGRAERARIVHPLLAQPVVEACLAIPAPILSAGEGERSFAREAFADRLPPSIVGRRSKGEISVFLNRSLAASAPFLRGFLLEGRLAARGLIDRDELAAALEPEAIVWKDASRDLLTAAALEAWVRHWEARIGEGEAAEGERAAGRGTAATGPRTSARKANTR

SEQ ID NO: 291 - protein, 51 aa, Artificial Sequence; identical to SEQ ID NO: 173
  Synthetic

SEQ ID NO: 292 - protein, 181 aa, Artificial Sequence; identical to SEQ ID NO: 174
  Synthetic

SEQ ID NO: 293 - protein, 76 aa, Artificial Sequence
  Synthetic
MTNLLKEWKMPLERTHNNSNPAGDIFQELEDQDILAGVNGAENLYFQGCAWYNISCRLGNKGAYCTLTVECMPSCN

SEQ ID NO: 294 - protein, 66 aa, Artificial Sequence
  Synthetic
MVNSKDLRNPEFRKAQGLQFVDEVNEKELSSLAGSENLYFQGTTWPCATVGVSVALCPTTKCTSQC

SEQ ID NO: 295 - protein, 1057 aa, Artificial Sequence
  Synthetic
MRELQNALYFSEVVFGPNLEKIVGEKRLNFWLKLIGEDPENLKEFLSRKGNSFEEQTLPEKEAIVPNRLGEEALEKVREELEFLNTYSTKHVRRVKELGVQIPFEGILLPFISMYIEKFQQQQLRKKIGPIHEEIWTQIVQDITSKLNAILHRTLILELNVARVTSQLKGDTPEERFAYYSKTYLGKREVTHRLYSEYPVVLRLLFTTISHHISFITEILERVANDREAIETEFSPCSPIGTLASLHLNSGDAHHKQRTVTILEFSSSLKLVYKPRSLKVDGVFNGLLAFLNDRTGEVIKDQYCPKVLQRDGYGYVEFVTHQSCQSLEEVSDFYERLGSLMSLSYVLNSSDFHFENIIAHGPYPVLIDLETIIHNTADSSEETSTAMDRAFRMLNDSVLSTGMLPSSIYYRDQPNMKGLNVGGVSKSEGQKTPFKVNQIANRNTDEMRIEKDHVTLSSQKNLPIFQSAAMESVHFLDQIQKGFTSMYQWIEKNKQEFKEQVRKFEGVPVRAVLRSTTRYTELLKSSYHPDLLRSALDREVLLNRLTVDSVMTPYLKEIIPLEVEDLLNGDVPYFYTLPEERALYQEASAINSTFFTTSIFHKIDQKIDKLGIEDHTQQMKILHMSMLASNANHYADVADLDIQKGHTIKNEQYVEMAKDIGDYLMELSVEGENQGEPDLCWISTVLEGSSEIIWDISPVGEDLYNGSAGVALFYAYLFKITGEKRYQEIAYKALVPVRRSVAQFQHHPNWSIGAFNGASGYLYAMGTIAALFNDERLKHEVTRSIPHIEPMIHEDKIYDFIGGSAGALKVFLSLSGLFDEPKFLELAIACSEHLMKNAIKTDQGIGWKPPWEVTPLTGFSHGVSGVMASFIELYQQTGDERLLSYIDQSLAYERSFFSEQEENWLTPNKETPVVAWCHGAPGILVSRLLLKKCGYLDEKVEKEIEVALSTTIRKGLGNNRSLCHGDFGQLEILRFAAEVLGDSYLQEVVNNLSGELYNLFKTEGYQSGTSRGTESVGLMVGLSGFGYGLLSAAYPSAVPSILTLDGEIQKYREPHEA

SEQ ID NO: 296 - protein, 990 aa, Artificial Sequence
  Synthetic
MKTPLTSEHPSVPTTLPHTNDTDWLEQLHDILSIPVTEEIQKYFHAENDLFSFFYTPFLQFTYQSMSDYFMTFKTDMALIERQSLLQSTLTAVHHRLFHLTHRTLISEMHIDKLTVGLNGSTPHERYMDFNHKFNKTSKSKNLFNIYPILGKLVVNETLRTINFVKKIIQHYMKDYLLLSDFFKEKDLRLTNLQLGVGDTHVNGQCVTILTFASGQKVVYKPRSLSIDKQFGEFIEWVNSKGFQPSLRIPIAIDRQTYGWYEFIPHQEATSEDEIERYYSRIGGYLAIAYLFGATDLHLDNLIACGEHPMLIDLETLFTNDLDCYDSAFPFPALARELTQSVFGTLMLPITIASGKLLDIDLSAVGGGKGVQSEKIKTWVIVNQKTDEMKLVEQPYVTESSQNKPTVNGKEANIGNYIPHVTDGFRKMYRLFLNEIDELMDHNGPIFAFESCQIRHVFRATHVYAKFLEASTHPDYLQEPTRRNKLFESFWNITSLMAPFKKIVPHEIAELENHDIPYFVLTCGGTIVKDGYGRDIADLFQSSCIERVTHRLQQLGSEDEARQIRYIKSSLATLTNGDWTPSHEKTPMSPASADREDGYFLREAQAIGDDILAQLIWEDDRHAAYLIGVSVGMNEAVTVSPLTPGIYDGTLGIVLFFDQLAQQTGETHYRHAADALLEGMFKQLKPELMPSSAYFGLGSLFYGLMVLGLQRSDSHIIQKAYEYLKHLEECVQHEETPDFVSGLSGVLYMLTKIYQLTNEPRVFEVAKTTASRLSVLLDSKQPDTVLTGLSHGAAGFALALLTYGTAANDEQLLKQGHSYLVYERNRFNKQENNWVDLRKGNAYQTFWCHGAPGIGISRLLLAQFYDDELLHEELNAALNKTISDGFGHNHSLCHGDFGNLDLLLLYAQYTNNPEPKELARKLAISSIDQAHTYGWKLGLNHSDQLQGMMLGVTGIGYQLLRHINPTVPSILALELPSSTLTEKELRIHDR

SEQ ID NO: 297 - protein, 87 aa, Artificial Sequence
  Synthetic
MKNPTLLPKLTAPVERPAVTSSDLKQASSVDAAWLNGDNNWSTPFAGVNAAWLNGDNNWSTPFAGVNAAWLNGDNNWSTPFAADGAE

SEQ ID NO: 298 - protein, 290 aa, Artificial Sequence
  Synthetic
MINYANAQLHKSKNLMYMKAHENIFEIEALYPLELFERFMQSQTDCSIDCACKIDGDELYPARFSLALYNNQYAEKQIRETIDFFHQVEGRTEVKLNYQQLQHFLGADFDFSKVIRNLVGVDARRELADSRVKLYIWMNDYPEKMATAMAWCDDKKELSTLIVNQEFLVGFDFYFDGRTAIELYISLSSEEFQQTQVWERLAKVVCAPALRLVNDCQAIQIGVSRANDSKIMYYHTLNPNSFIDNLGNEMASRVHAYYRHQPVRSLVVCIPEQELTARSIQRLNMYYCMN

SEQ ID NO: 299 - protein, 39 aa, Artificial Sequence; identical to SEQ ID NO: 175
  Synthetic

SEQ ID NO: 300 - protein, 600 aa, Artificial Sequence
  Synthetic
MKGEEMLGHPQTGFVVLPDNDATGDVTGRLLPWGDVVTVYPSGRPWIIGNCWDRPVLVHDGVIVLGHTSVTRDQIARHGNDPHRLLDEADGAFHAAVLIGHEVHVRGSAYGVCRLYTCVVDGVTLVSDRTDVLQRLAGTDVDVDVLAGHLLEPIPHWLGEQPLLTSVEPVPPTHHVILTPDARSRLRPSRRRRPEPSLGLRDGAELVRERLAAAVATRVDSPALITSELSGGYDSTSVSYLAARGKAEVVLVTAAGRDSTSEDLWWAERAAAGLPELDHVVLPADELPFTYAGLTEPGALLDEPCTAVAGRERVLALVRKAAARGSTLHLTGHGGDHLFTSLPTPFHDLFRTRPVAALRQLRAFGALAAWPTRKLMRELADRRDHSTWWRAHARPQNGQPDPHSPMLGWAIPPTVPAWVTADGVRAIELGILEMAERAEPLGHARGEHAELDSIFEGARMARGLNRMATHAGVPLAAPFHDDRVVEACLSIRPEERISAWQYKPLLNAAMQGVVPSTVLDRSAKDDGSIDVAYGLQEHRDELVALWESSRLAETGLIDAGMLRRLCAQPSSHELEHGSLYATIACELWLRGLDQDRTQRY

SEQ ID NO: 301 - protein, 84 aa, Artificial Sequence
  Synthetic
MPVQLRRHVSFTATEYGGVLLDETKGAYWRLNTTGAEVVRAMGEAERDEIVRHVVATFDVDAQTAAQDVDVLLAELRDAGLVAS

SEQ ID NO: 302 - protein, 147 aa, Artificial Sequence
  Synthetic
MSVNMALRGHGMSGRRRRLDATRARLAVVVARVLNLLPPRLIRRCLRVLSRGARPASIEAAEAARRTVVAVSPAAAGAYGCLIRSIATTLVLRSRGQWPTWCVGVRAEPPFGAHAWIEAEERLVDEPGTMHTYRRLITVGPLSRKVR

SEQ ID NO: 303 - protein, 345 aa, Artificial Sequence; identical to SEQ ID NO: 176
  Synthetic

SEQ ID NO: 304 - protein, 73 aa, Artificial Sequence
  Synthetic
MTKGLDKMLLTKKKKDSMGLLNEIDVTTLDEQLGGKMSKAWCRSMVVSCVYNLVDFSSSSDGKKTCALYRKYC

SEQ ID NO: 305 - protein, 466 aa, Artificial Sequence
  Synthetic
MDGTNKRLEDKWFDINFLEMYTRSCLKTFGYFDEILIVKKRIEVLKNVLEKQYLSTNDYAEEFFELNTTLESIKEYIKLNLVIEKEPISICIMVKNEERCIKRCIDSVEILAEEIIIIDTGSTDNTINIIEECANDKIKVFSKEWRNDFSEIRNYAIEKASSEWLVFIDADEYLDEASVLNLLSTLNIFNNHKLKDSIVLCPMINEANNTIHFRTGKFFRKDSGIKFFGTCHEEPRIKGMPNSTLLIPIKVDYLHDGYLAKVQSNKDKKTRNIELLEGMVELEPDNPRWAYMFVRDGFAILDNEYIEKTCLRFLLLDKNVRICVNNLQDHKFTLSLLTILGRLYLRECEFEKSNLIIRILDELIPNSLDGKFLAFMERFSKLKIEINTLLTEVIEYRRNHEVDETSLINTQGYHIDYVLSILLFETGNYAQSKKYFDFLQENHFLEELFQDSSYSIILKMLESVED

SEQ ID NO: 306 - protein, 59 aa, Artificial Sequence
  Synthetic
MNKNEIETQPVTWLEEVSDQNFDEDVFGACSTNTFSLSDYWGNNGAWCTLTHECMAWCK

SEQ ID NO: 307 - protein, 65 aa, Artificial Sequence
  Synthetic
MKEKNMKKNDTIELQLGKYLEDDMIELAEGDESHGGTTPATPAISILSAYISTNTCPTTKCTRAC

SEQ ID NO: 308 - protein, 980 aa, Artificial Sequence
  Synthetic
MKFNKNVFPEINETDFDNNIKPLLDELESRITIPQEELSFSSINDDLFRELTRNEEYPYQSICTIVANIVMDDGSEIWRKDIFVDSNSVREAVCDILSQTLFLYFIRCFSEQIKDIRKTDEDKESTYNRYINLLFSSNFKIFSDEYPVLWYRTIRIIKNRWYSIKKSLLLTQKHRVEIDKQLDIPHKMKIKGLKIGGDTHNGGATVTTIFFEKGYKLIYKPRSTSGEFSYKKFIEKINPYLKKDMGAIKAIDFGEYGFSEYIECNTDEEDMKQVGQLAFFMYLLNASDMHYSNVIWTKQGPVPIDLETLFQPDRIRKGLKQSETNAYHKMEKSVYGTGIIPISLSVKGKKGEVDVGFSGIRDERSSSPFRVLEILDGFSSDIKIVWKKQQKSSSSKNNLIVDHKKEREILQRAQSVVEGFQETSKIFMKHREEFISIILDSFENIKIRYIHNMTFRYEQLLRTLTDAEPAQKIELDRLLLSRTGILSISSSPYISLSECQQMWQGDVPYFYSKFSSKSIFDTNGFVDEIELTPRQAFIIKAESITNDEVDFQSKIIKLAFMARLSDPHTTNDNKLNKKVIIESNQQSNSSESGNKAILFLSDLLKNNVLEDRYSHLPKTWIGPVARDGGLGWAPGVLGYDLYSGRTGPALALAAAGRVLKDKDSIELSADIFNKSSQILQEKTYDFRNLFASGIGGFSGITGLFWALNAAGNILNNDDWIKTSNQSMLLLNENMLKVDKNFFDLISGNSGAIGMMYLTNPNFYLSRSKINDILLTTDCLITEMEKDETSGLAHGVSQILWFLSIMMQRQPSSEIKIRATIVDNIIKKKYTNSYGEIECYYPTDGHSKSTSWCNGTSGILVAYIEGYKANIVDKSSVYHIINQINVEQLQHDNIPIMCHGSLGVYESLKYASKYFEIETKYLLDVMRNGGCSSQEVLKYYGKGNGRYPLSPGLMAGQSGALLHCCKLEDNDISVSPISLMT

SEQ ID NO: 309 - protein, 927 aa, Artificial Sequence
  Synthetic
MDPSIKKLVDSIIEFYKKDIYLAYKELEREIKNIDKTIYNTSNDEILRIFKESLISIITDDIYRLSIKTFIYEFHKFRIDNGFPAVKDSESAFNYYISTFDVKTIARWFEKFPMLESIISSSIKNDCTFMVDVCVNFILDLSECEKINLISEDSRLITISSSNSDPHNGGTRVLFFRFHNGDTILYKPRSLTVDKLISNIFEEVFEFDATNSKNPIPKVLDRGTYGWQEFIEKKSISSSEIKQAYYNLGIFSSIFTVLGSTDIHDENLIFKGTTPYFIDLETALSPRIRYEGNEENLFYRMSSSLFTSIVGTTIIPAKLAVHSQEIMIGAINTPAKQKTKKDGFNIINFGTDAVDIAKQNIEVERIANPMRIKNNIVNDPLPYQNIFTRGFKEGIKSIILKKGSIISILNNFNSPIRYIMRPTAKYYLILDAAVFPENLYSEQTLNKTLNYLKPPKIVENSLISKQLFLAEKRILSEGDIPSFYVLGKEKNIRAQNFISEQIFEETAVDNAIQILESISQDWVNFNERLIAEGFSYIREQSRGYLSSDFENSDIFKSSLTETKKSGYTAMLKTIISMSVKTSENKKIGWLPGIYDDYPISYMSAAFCSFHDSGGIITLLEHHFGHCSPEYNEMKRGLLELGKMLKINNSNLSIISGSESLEFLYTHREVECLELEYILNNSAEIMGDVFLGKLGLYLILASYLKTDLKIFQDFSIICQKNLEFKKFGIAHGELGYLWTIFRIQNKLKNKNACLSIYHEVLNIYKGKRIESVGWCNGLSGILMILSEMSTVLEKNQDYLFKLANLSTKLNEESVDLSVCHGASGVLQTLLFVYSNTNDKRYLSLANKYWKKVLDNSIKYGFYNGERDKDYLLGYFQGWSGFTDSALLLDKYNNNEQVWIPINLSSDIYQHNLNNCKEKNYEGDGCHKS

SEQ ID NO: 310 - protein, 775 aa, Artificial Sequence; identical to SEQ ID NO: 80
  Synthetic

SEQ ID NO: 311 - protein, 70 aa, Artificial Sequence
  Synthetic
MELKASEFGVVLSVDALKLSRQSPLGVGIGGGGGGGGGGGSCGGQGGGCGGCSNGCSGGNGGSGGSGSHI

SEQ ID NO: 312 - protein, 272 aa, Artificial Sequence
  Synthetic
MSKHELSLVEVTHYTDPEVLAIVKDFHVRGNFASLPEFAERTFVSAVPLAHLEKFENKEVLFRPGFSSVINISSSHNFSRERLPSGINFCDKNKLSIRTIEKLLVNAFSSPDPGSVRRPYPSGGALYPIEVFLCRLSENTENWQAGTNVYHYLPLSQALEPVATCNTQSLYRSLSGGDSERLGKPHFALVYCIIFEKALFKYRYRGYRMALMETGSMYQNAVLVADQIGLKNRVWAGYTDSYVAKTMNLDQRTVAPLIVQFFGDVNDDKCLQ

SEQ ID NO: 313 - protein, 396 aa, Artificial Sequence
  Synthetic
MINVYSNLMSAWPATMAMSPKLNRNMPTFSQIWDYERITPASAAGETLKSIQGAIGEYFERRHFFNEIVTGGQKTLYEMMPPSAAKAFTEAFFQISSLTRDEIITHKFKTVRAFNLFSLEQQEIPAVIIALDNITAADDLKFYPDRDTCGCSFHGSLNDAIEGSLCEFMERQSLLLYWLQGKANTEISSEIVTGINHIDEILLALRSEGDIRIFDITLPGAPGHAVLTLYGTKNKISRIKYSTGLSYANSLKKALCKSVVELWQSYICLHNFLIGGYTDDDIIDSYQRHFMSCNKYESFTDLCENTVLLSDDVKLTFEENITSDTNLLNYLQQISDNIFVYYARERVSNSLVWYTKIVSPDFFLHMNNSGAININNKIYHTGDGIKVRESKMVPFP

SEQ ID NO: 314 - protein, 50 aa, Artificial Sequence
  Synthetic
MAYPNDQQGKALPFFARFLSVSKEESSIKSPSPEPTYGGTFKYPSDWEDY

SEQ ID NO: 315 - protein, 41 aa, Artificial Sequence
  Synthetic
MALPFFARFLSVSKEESSIKSPSPEPTYGGTFKYPSDWEDY

SEQ ID NO: 316 - protein, 324 aa, Artificial Sequence
  Synthetic
MTVLIVTFSHDNESIPLVIKAIEAMGKKAFRFDTDRFPTEVKVDLYSGGQKGGIITDGEQKLELKEVSSVWYRRMRYGLKLPDGMDSQFREASLKECRLSIRGMIASLSGFHLDPIAKVDHANHKQLQLQVAQQLGLLIPGTLTSNNPEAVKQFAREFEATGIVTKMLSQFAIYGDKQEEMVVFTSPVTKEDLDNLEGLQFCPMTFQENIPKALELRITIVGEQIFTAAINSQQLDGAIYDWRKEGRALHQQWQPYDLPKTIEKQLLELVKYFGLNYGAIDMIVTPDERYIFLEINPVGEFFWLELYPPYFPISQAIAEILVNS

SEQ ID NO: 317 - protein, 33 aa, Artificial Sequence
  Synthetic
MPADILETRTSETEDLLDLDLSIGVEEITAGPA

SEQ ID NO: 318 - protein, 227 aa, Artificial Sequence
  Synthetic
MTAHSDAGGDPRPPERLLLGVSGSVAALNLPAYIYAFRAAGVARLAVVLTPAAEGFLPAGALRPIVDAVHTEHDQGKGHVALSRWAQHLLVLPATANLLGCAASGLAPNFLATVLLAADCPITFVPAMNPVMWRKPAVRRNVATLRADGHHVVDPLPGAVYEAASRSIVEGLAMPRPEALVRLLGGGDDGSPAGPAGPVGRAEHVGAVEAVEAVEAVEAVEAAEALA

SEQ ID NO: 319 - protein, 568 aa, Artificial Sequence
  Synthetic
MARSEESNTLARLFDVLGDDAAAAREWVTEPHRLIASNERLGTAPEAPADDDPEAIRTVGVIGGGTAGYLTALALKAKRPWLDVALVESADIPIIGVGEATVSYMVMFLHHYLGIDPAEFYQHVRPTWKLGIRFEWGSRPEGFVAPFDWGTGSVGLVGSLRETGNVNEATLQAMLMTEDRVPVYRGEGGHVSLMKYLPFAYHMDNARLVRYLTELATRRGVHHVDATVAEVRLDGPDHVGDLITTDGRRLHYDFYVDCTGFRSLLLEKALGIPFESYASSLFTDAAITGTLAHGGHLKPYTTATTMNAGWCWTIPTPESDHLGYVFSSAAIDPDDAAAEMARRFPGVTREALVRFRSGRHREAWRGNVIAVGNSYAFVEPLESSGLLMIATAVQILVSLLPSSRRDPLPSNVANQALAHRWDAIRWFLSIHYRFNGRLDTPFWKEARAETDISGIEPLLRLFSAGAPLTGRDSFARYLADGAAPLFYGLEGVDTLLLGQEVPARLLPPRESPEQWRARAAAARSLASRGLRQSEALDAYAADPCLNAELLSDSDSWAGERVAVRAGLR

SEQ ID NO: 320 - protein, 414 aa, Artificial Sequence
  Synthetic
MIFGPDFHRDPYPVYRRLRDEAPCHHEPALGLYALSRYEDVLAALRQPTVFSSAARAVASSAAGAGPYRGADTVSPERETAAEGPARSLLFLDPPEHQVLRQAVSRGFTPQAVLRLEPAVRDIAAGLADRIPDRGGGEFVTEFAAPLAIAVILRLLGVPEADRARVSELLSASALSGAEAELRSYWLGLSALLRDREDAGEGDGEDRGVVAALVRPDAGLRDADVAAGPAVRAPLTDEQVAAFCALVGQAGTESVAMALSNALVLFGRHHDQWRTLCARPDAIPAAFEEVLRYWAPTQHQGRTLTAAVRLHGRLLPAGAHVLLLTGSAGRDERAYPDPDVFDIGRFHPDRRPSTALGFGLGAHFCLGAALARLQARVALRELTRRFPRYRTDEERTVRSEVMNGFGHSRVPFST

SEQ ID NO: 321 - protein, 178 aa, Artificial Sequence
  Synthetic
MTTGTTVAHAVEPDGFRAVMATLPAAVAIVTAAAADGRPWGMTCSSVCSVTLTPPTLLVCLRTASPTLAAVVSGRAFSVNLLCARAYPVAELFASAAADRFDRVRWRRPPGTGGPHLADDARAVLDCRLSESAEVGDHVVVFGQVRAIRRLSDEPPLMYGYRRYAPWPADRGPGAAGG

SEQ ID NO: 322 - protein, 373 aa, Artificial Sequence; identical to SEQ ID NO: 180
  Synthetic

SEQ ID NO: 323 - protein, 30 aa, Artificial Sequence; identical to SEQ ID NO: 181
  Synthetic

SEQ ID NO: 324 - protein, 42 aa, Artificial Sequence; identical to SEQ ID NO: 182
  Synthetic

SEQ ID NO: 325 - protein, 313 aa, Artificial Sequence; identical to SEQ ID NO: 183
  Synthetic

SEQ ID NO: 326 - protein, 61 aa, Artificial Sequence; identical to SEQ ID NO: 184
  Synthetic

SEQ ID NO: 327 - protein, 432 aa, Artificial Sequence; identical to SEQ ID NO: 185
  Synthetic

SEQ ID NO: 328 - protein, 49 aa, Artificial Sequence
  Synthetic
MLKQINVIAGVKEPIRAYGCSANDACYFCDTRDNCKACDASDFCIKSDT

SEQ ID NO: 329 - protein, 54 aa, Artificial Sequence
  Synthetic
LKQINVIAGVKEPIRAYENLYFQGCSANDACYFCDTRDNCKACDASDFCIKSDT

SEQ ID NO: 330 - protein, 467 aa, Artificial Sequence; identical to SEQ ID NO: 81
  Synthetic

SEQ ID NO: 331 - protein, 41 aa, Artificial Sequence
  Synthetic
SKKEWQEPTIEVLDINQTMAGKGWKQIDWVSDHDADLHNPS

SEQ ID NO: 332 - protein, 347 aa, Artificial Sequence
  Synthetic
MHDRSANVSWTKYIAFGLRIASELNLPELILAAPEAVEDVVIRQADLTAWSGQLEQANFVMLDERFMFQIPGTAIYAVREGKEIEVSIFSGADPDTVRLFVLGTCMGVLLMQRRILPIHGSAVVIGGRAYAFVGESGTGKSTLAAAFRQAGYQMVSDDVIAVKATASSAIVYPAYPQQKLGLDSLLQLEALRENKHARKRNNIRSLTDGNSVMPQYSDLRMLAGELNKYAVPAVDEFFNDPLPLGGVFELVADSPIRALMREGELVAVTEQPLNVLECLHTLLQHTYRRVIIPRMGLSEWSFDTAARMARKVEGWRLLRDSSVFTASEVVQRVLDIIRKEEKSYGSH

SEQ ID NO: 333 - protein, 50 aa, Artificial Sequence
  Synthetic
MNLNDLPMDVFEMADSGMEVESLTAGHGMPEVGASCNCVCGFCCSCSPSA

SEQ ID NO: 334 - protein, 372 aa, Artificial Sequence
  Synthetic
MLSSALEVDIDEAAVAADLRELAAALDRSGYGEILTCFLPQKAQAHIWAQTAAKIDGPLRTLMELFLLGRAVPQDDLPPRIAAVIPGLVSAGLVKTGQGAVWLPNLILLRPMGQWLWCQRPHPSPTMYFGDDSLALVHRMVTYRGGRALDLCAGPGVQALTAALRSEHVTAVEINPVAAALCRTNIAMNGLSDRMEVRLGSLYDVVRGEVFDDIVSNPPLLPVPEDVQFAFVGDGGRDGFDISWTILDGLPEHLSDRGACRIVGCVLSDGYVPVVMEGLGEWAAKHDFDVLLTVTAHVEAHKDSSFLRSMSLMSSAISGRPAEELQERYAADYAELGGSHVAFYELCARRGGGSARLADVSATKRSAEVWFV

SEQ ID NO: 335 - protein, 344 aa, Artificial Sequence
  Synthetic
MTQYPLSRPEPLGVHPDYRRLRETCPVARVGSPYGPAWLVTRYADVAAVLTDARFSRAAAPEDDGGILLNTDPPEHDRLRKLIVAHTGTARVERLRPRAEEIAVALARRIPGEGEFISAFAEPFSHRVLSLFVGHLVGLPAQDLGPLATVVTLAPVPDRERGAAFAELCRRLGRQVDRETLAVVLNVVFGGHAAVVAALGYCLLAALDAPLPRLAGDPEGIAELVEETLRLAPPGDRTLLRRTTEPVELGGRTLPAGALVIPSIAAANRDPDRPVGRRMPRHLAFGRGAHACLGMALARMELQAALKALAEHAPDVRLPAGTGALVRTHEELSVSPLAGIPIQR

SEQ ID NO: 336 - protein, 144 aa, Artificial Sequence
  Synthetic
MSSNILEKVKEFFVRLVKDDAFQSQLQNNSIDEVRNILQEAGYIFSKEEFETATIELLDLKERDEFHELTEEELVTAVGGVTGGSGIYGPIQAMYGAVVGDPKPGKDWGWRFPSPLPKPSPIPSPWKPPVDVQPMYGVVVSNDS

SEQ ID NO: 337 - protein, 420 aa, Artificial Sequence
  Synthetic
MTYRRTSYAVWEITLKCNLACSHCGSRAGHTRAKELSTQEALDLVRQMADVGIIEVTLIGGEAFLRPDWLQIAEAITKAGMLCSMTTGGYGISLETARKMKAAGIASVSVSIDGLEETHDRLRGRKGSWQAAFKTMSHLREVGIFFGCNTQINRLSAPEFPLIYERIRDAGARAWQIQLTVPMGRAADNANILLQPYELLDLYPMIARVARRARQEGVQIQPGNNIGYYGPYERLLRGRGSDSEWAFWQGCAAGLSTLGIEADGAIKGCPSLPTSAYTGGNIREHSLREIVEESEQLRFNLGAGTSQGTAHLWGFCQTCEFSELCRGGCTWTAHVFFNRRGNNPYCHHRALFQAEQGIRERVVPKVEAQGLPFDNGEFELIEEPIDAPLPENDPLHFTSDLVQWSASWQEESESIGAVVD

SEQ ID NO: 338 - protein, 54 aa, Artificial Sequence
  Synthetic
MVENIDNEREKSANEIEPESLLLPRQAWQSQIAYLKAILKAKQALDRIEKRYLR

SEQ ID NO: 339 - protein, 38 aa, Artificial Sequence
  Synthetic
MEREIVWTEIEESDLAAVVSASNVKDGPTVSSSNVKDR

SEQ ID NO: 340 - protein, 102 aa, Artificial Sequence
  Synthetic
MSIENAKSFYERVSTDKQFRTQLENTASAEERQKIIQAAGFEFTNQEWEIAKEQILATSESNNGELSEAELTAVSGGVDLSIFELLDEEPLFPIRPLYGLPI

SEQ ID NO: 341 - protein, 98 aa, Artificial Sequence; identical to SEQ ID NO: 186
  Synthetic

SEQ ID NO: 342 - protein, 419 aa, Artificial Sequence; identical to SEQ ID NO: 187
  Synthetic

SEQ ID NO: 343 - protein, 56 aa, Artificial Sequence; identical to SEQ ID NO: 188
  Synthetic

SEQ ID NO: 344 - protein, 80 aa, Artificial Sequence
  Synthetic
MSEEQLKAFIAKVQADTSLQEQLKVEGADVVAIAKASGFAITTEDLNSHRQNLSDDELEGVAGGFFCVQGTANRFTINVC

SEQ ID NO: 345 - protein, 94 aa, Artificial Sequence
  Synthetic
MSEEQLKAFIAKVQADTSLQEQLKVEGADVVAIAKASGFAITTEDLKAHQANSQKNLSDAELEGVAGGTIGGTIGGTIVSITCETCDLLVGKMC

SEQ ID NO: 346 - protein, 1068 aa, Artificial Sequence; identical to SEQ ID NO: 82
  Synthetic

SEQ ID NO: 347 - protein, 71 aa, Artificial Sequence
  Synthetic
MSKNENNKKQLRDLFIEDLGKVTGGKGGPYTTLAIGEEDPITTLAIGEEDPDPTTLALGEEDPTTLAIGEE

SEQ ID NO: 348 - protein, 77 aa, Artificial Sequence
  Synthetic
MSKNENNKKQLRDLFIEDLGKVTGENLYFQGKGGPYTTLAIGEEDPITTLAIGEEDPDPTTLALGEEDPTTLAIGEE

SEQ ID NO: 349 - protein, 314 aa, Artificial Sequence
  Synthetic
MTNLDTSIVVVGSPDDLHVQSVTEGLRARGHEPYVFDTQRFPEEMTVSLGEQGASIFVDGQQIARPAAVYLRSLYQSPGAYGVDADKAMQDNWRRTLLAFRERSTLMSAVLLRWEEAGTAVYNSPRASANITKPFQLALLRDAGLPVPRSLWTNDPEAVRRFHAEVGDCIYKPVAGGARTRKLEAKDLEADRIERLSAAPVCFQELLTGDDVRVYVIDDQVICALRIVTDEIDFRQAEERIEAIEISDEVKDQCVRAAKLVGLRYTGMDIKAGADGNYRVLELNASAMFRGFEGRANVDICGPLCDALIAQTKR

SEQ ID NO: 350 - protein, 267 aa, Artificial Sequence
  Synthetic
MDYHFISGLPRAGSSLLAALLRQNPQLHADVTSPVARLYAAMLMGMSEEHPSNVQIDDAQRVRLLRAVFDAYYQNRQELGTVFDTNRAWCSRLTGLARLFPRSRMICCVRDVGWIVDSFERLAQSQPLRLSALFGYDPEDSVSMHADLLTAPRGVVGYALDGLRQAFYGDHADRLLLLRYDTLAQRPAQAMEQVYAFLQLPAFAHDYAGVQAEAERFDAALQMPGLHRVRRGVHYVPRRSVLPPALFDQLQELAFWESAPSHGALLV

SEQ ID NO: 351 - protein, 60 aa, Artificial Sequence
  Synthetic
MNHSKKSPAKGAASLQRPAGAKGRPEPLDQRLWKHVGGGDYPPPGANPKHDPPPRNPGHH

SEQ ID NO: 352 - protein, 43 aa, Artificial Sequence
  Synthetic
MKKAVIVENKGCATCSIGAACLVDGPIPDFEIAGATGLFGLWG

SEQ ID NO: 353 - protein, 51 aa, Artificial Sequence
  Synthetic
MENQDLELLARLHALPETEPVGVDGLPYGETCECVGLLTLLNTVCIGISCA

SEQ ID NO: 354 - protein, 909 aa, Artificial Sequence
  Synthetic
MTSHATEVEWEDLLRQALHATGTGARWAVEADEMWCRVAPVPGTRREQGWKLHVSATTASAPEVLTRALGVLLREKSGFKFARSLEQVSALNSRATPRGSSGKFITVYPRSDAEAVALARDLHAATAGLAGPRILSDQPYAAHSLVHYRYGAFVGRRRLSDDGLLVWFIEDPDGNPVEDKRTGRYAPPPWAVCPFPASVPVAPHDGEATSRPVVLGGRFAVREAIRQTNKGGVYRGSDTRTGTGVVIKEARPHVEGDASGGDVRDWLRAEARTLEKLKGTGLAPEAVALFEHAGHLFLAQDEVPGVTLRTWVAEHFRDVGGERYRADALAQVARLVDLVAAAHARGLVLRDFTPGNVMVRPDGELRLIDLELAVLEDEAALPTHVGTPGFSAPERLADAPVRPTADYYSLGATACFVLAGKVPNLLPEEPVGRPSEERLAAWLTACTRPLRLPDGVVDMILGLMRDDPAERWDPSRAREALRKADPTARPGDADRTAVRRTGSSAVAGPVPDSRTADGRTADGRSADEVVAGLVDHLVDSMTPADDRLWPVSTLTGESDPCTVQQGAAGVLAVLTRYFELTGDPRLPGLLSTAGRWIADRTDVRSPRPGLHFGGRGTAWALYDAGRAVDDRRLVEHALDLALAPPQATPHHDVTHGTAGSGLAALHLWQRTGDTRFADLAVEAADRLTAAARREPSGVGWAVPAEADSPEGGKRYLGFAHGAAGIGCFLLAAAELSRQPDHRATALEVGEGLVADAVRIGEAAQWPAQSGDLPTAPYWCHGAAGIGTFLVRLWQATGDDRFGDLARGSAHAVAERASRAPLAQCHGLAGNGDFLLDLADATGDPVHRDTAEELAGLILAEGTRRQGHVVFPNEYGEVSSSWSDGSAGILAFLLRTRHTGPRHWMVEQRG

SEQ ID NO: 355 - protein, 37 aa, Artificial Sequence
  Synthetic
MKKFYEAPALIERGAFAAATAGFGRLLADQLVGRLIP

SEQ ID NO: 356 - protein, 318 aa, Artificial Sequence
  Synthetic
MADHIAAGHDTVLSLAERTGTDPDLLGRVLRFLACRGVFAEPRPGTYALTPLSLTLLEGHPSGLREWLDASGAGARMDAAVGDLLGALRSGEPSYPRLHGRPFYEDLALHSRGPAFDGLRHTHAESYVADLLAAYPWERVRRVVDVGGGTGVLVEALMRTHATLRTVLVDLPGAVATATARIAAAGFGNRYTPVTGSFFDPLPAGADVYTLVNVVHNWNDERASALLRRCADAGRRDSTFVIVERLADDADPRAITAMDLRMFLFLGGKERTAAQIREVASAAGMAHQSTIKTPSGLHLLVFRKKRFAARGHGRRMVT

SEQ ID NO: 357 - protein, 49 aa, Artificial Sequence
  Synthetic
MDLNDLPMDVFELADSGVAVESLTAGHGMTEVGASCNCFCYICCSCSSA

SEQ ID NO: 358 - protein, 42 aa, Artificial Sequence
  Synthetic
MDNKVAKNVEVKKGSIKATFKAAVLKSKTKVDIGGSRQGCVA

SEQ ID NO: 359 - protein, 64 aa, Artificial Sequence; identical to SEQ ID NO: 189
  Synthetic

SEQ ID NO: 360 - protein, 308 aa, Artificial Sequence; identical to SEQ ID NO: 83
  Synthetic

SEQ ID NO: 361 - protein, 42 aa, Artificial Sequence; identical to SEQ ID NO: 191
  Synthetic

SEQ ID NO: 362 - protein, 310 aa, Artificial Sequence; identical to SEQ ID NO: 192
  Synthetic

SEQ ID NO: 363 - protein, 781 aa, Artificial Sequence
  Synthetic
MQPTALQIKPHFHVEIIEPKQVYLLGEQGNHALTGQLYCQILPFLNGEYTREQIVEKLDGQVPEEYIDFVLSRLVEKGYLTEVAPELSLEVAAFWSELGIAPSVVAEGLKQPVTVTTAGKGIREGIVANLAAALEEAGIQVSDPRDPKAPKAGDSTAQLQVVLTDDYLQPELAAINKEALERQQPWLLVKPVGSILWLGPLFVPGETGCWHCLAQRLQGNREVEASVLQQKRALQERNGQNKNGAVSCLPTARATLPSTLQTGLQWAATEIAKWMVKRHLNAIAPGTARFPTLAGKIFTFNQTTLELKAHPLSRRPQCPTCGDRETLQRRGFEPLKLESRPKHFTSDGGHRAMTPEQTVQKYQHLIGPITGVVTELVRISDPANPLVHTYRAGHSFGSATSLRGLRNVLRHKSSGKGKTDSQSRASGLCEAIERYSGIFQGDEPRKRATLAELGDLAIHPEQCLHFSDRQYDNRESSNERATVTHDWIPQRFDASKAHDWTPVWSLTEQTHKYLPTALCYYRYPFPPEHRFCRSDSNGNAAGNTLEEAILQGFMELVERDSVCLWWYNRVSRPAVDLSSFDEPYFLQLQQFYQTQNRDLWVLDLTADLGIPAFVGVSNRKAGSSERIILGFGAHLDPTVAILRALTEVNQIGLELDKVSDESLKNDATDWLVNATLAASPYLVADASQPLKTAKDYPRRWSDDIYTDVMTCVEIAKQAGLETLVLDQTRPDIGLNVVKVIVPGMRFWSRFGSGRLYDVPVKLGWREQPLAEAQMNPTPMPF

SEQ ID NO: 364 - protein, 52 aa, Artificial Sequence
  Synthetic
MNKKNILPQLGQPVIRLTAGQLSSQLAELSEEALGGVDASYAVFWPICSYDD

SEQ ID NO: 365 - protein, 66 aa, Artificial Sequence; identical to SEQ ID NO: 177
  Synthetic

SEQ ID NO: 366 - DNA, 90 bp, Artificial Sequence; identical to SEQ ID NO: 193
  Synthetic

SEQ ID NO: 367 - DNA, 54 bp, Artificial Sequence; identical to SEQ ID NO: 194
  Synthetic

SEQ ID NO: 368 - DNA, 54 bp, Artificial Sequence; identical to SEQ ID NO: 195
  Synthetic

SEQ ID NO: 369 - DNA, 55 bp, Artificial Sequence
  Synthetic
acctgtaggatcgtacaggtttacgcaagaaaatggtttgttacagtcgaataaa

SEQ ID NO: 370 - DNA, 73 bp, Artificial Sequence; identical to SEQ ID NO: 196
  Synthetic

SEQ ID NO: 371 - DNA, 75 bp, Artificial Sequence
  Synthetic
atcccgaaaatttatcaaaaagagtattgacttaaagtctaacctataggatacttacagccatcgagagctgcg

SEQ ID NO: 372 - DNA, 28 bp, Artificial Sequence
  Synthetic
ggaagagagtcaattcagggtggtgaat

SEQ ID NO: 373 - DNA, 28 bp, Artificial Sequence
  Synthetic
ggaagagagtcaattcagggtggtgaat

SEQ ID NO: 374 - DNA, 35 bp, Artificial Sequence; identical to SEQ ID NO: 204
  Synthetic

SEQ ID NO: 375 - DNA, 31 bp, Artificial Sequence
  Synthetic
ttccaccatcaaaacacggagagtagcccac

SEQ ID NO: 376 - DNA, 31 bp, Artificial Sequence
  Synthetic
agaatcaagcaagtcaaaggagttaacccga

SEQ ID NO: 377 - DNA, 33 bp, Artificial Sequence
  Synthetic
agagtttaggagaaagacataaggaaatattaa

SEQ ID NO: 378 - DNA, 30 bp, Artificial Sequence
  Synthetic
ggaagcagccgtaaaaggtaggtttttttt

SEQ ID NO: 379 - DNA, 32 bp, Artificial Sequence
  Synthetic
agacgcttgaaccagcaataaggagagtaatt

SEQ ID NO: 380 - DNA, 28 bp, Artificial Sequence
  Synthetic
agaggctatataggataggggggtcccc

SEQ ID NO: 381 - DNA, 31 bp, Artificial Sequence
  Synthetic
agagctgttagtcgctgccaggaggtcccgt

SEQ ID NO: 382 - DNA, 32 bp, Artificial Sequence
  Synthetic
cttttaacatcccttctcataaggaggtttta

SEQ ID NO: 383 - DNA, 32 bp, Artificial Sequence
  Synthetic
gccccgtcagacaccttctaaggaggacatat

SEQ ID NO: 384 - DNA, 30 bp, Artificial Sequence
  Synthetic
agagacgggcggccaccaggaggaacgaga

SEQ ID NO: 385 - DNA, 43 bp, Artificial Sequence
  Synthetic
agaggcctacagatattccagactaacactaaggaggaaaacg

SEQ ID NO: 386 - DNA, 37 bp, Artificial Sequence
  Synthetic
tggcttccgtttttcaccacttgttaaggagtacttt

SEQ ID NO: 387 - DNA, 29 bp, Artificial Sequence
  Synthetic
agaaatttttcataccgagggaggaaaat

SEQ ID NO: 388 - DNA, 28 bp, Artificial Sequence
  Synthetic
agacagtagtataaaggagggttcaagt

SEQ ID NO: 389 - DNA, 22 bp, Artificial Sequence
  Synthetic
ttcaataaattaaggaattttg

SEQ ID NO: 390 - DNA, 23 bp, Artificial Sequence
  Synthetic
agaaccactataaggaacgattt

SEQ ID NO: 391 - DNA, 31 bp, Artificial Sequence
  Synthetic
cagtataactagaacaacaaggagtcagata

SEQ ID NO: 392 - DNA, 23 bp, Artificial Sequence
  Synthetic
agatcccgataaaggaggtccta

SEQ ID NO: 393 - DNA, 21 bp, Artificial Sequence
  Synthetic
taacataaggagggtttctaa

SEQ ID NO: 394 - DNA, 29 bp, Artificial Sequence
  Synthetic
agaggaacgagaaataaggacacagatat

SEQ ID NO: 395 - DNA, 33 bp, Artificial Sequence
  Synthetic
agatcacccataccaagtataacgagaacctcc

SEQ ID NO: 396 - DNA, 29 bp, Artificial Sequence
  Synthetic
agatcactgcaatagtaaggaggtatata

SEQ ID NO: 397 - DNA, 32 bp, Artificial Sequence
  Synthetic
agcaccgaggggtcaataataaggaggtaaac

SEQ ID NO: 398 - DNA, 24 bp, Artificial Sequence
  Synthetic
actgaactataaggtaggtatatt

SEQ ID NO: 399 - DNA, 24 bp, Artificial Sequence
  Synthetic
ccaatcaaggaggtagaaaacata

SEQ ID NO: 400 - DNA, 24 bp, Artificial Sequence
  Synthetic
taaaaccgctcgtaaggaggtctt

SEQ ID NO: 401 - DNA, 30 bp, Artificial Sequence
  Synthetic
agaacgcagacaatttcataggaggtcccg

SEQ ID NO: 402 - DNA, 25 bp, Artificial Sequence
  Synthetic
agacaattcataaggaggttaaggt

SEQ ID NO: 403 - DNA, 33 bp, Artificial Sequence
  Synthetic
cctactactctgatccccataaggaggtttttt

SEQ ID NO: 404 - DNA, 29 bp, Artificial Sequence
  Synthetic
caacctaatcttaggcgaggtcatttttt

SEQ ID NO: 405 - DNA, 29 bp, Artificial Sequence
  Synthetic
agagccatcagatttaaggaacataaaaa

SEQ ID NO: 406 - DNA, 26 bp, Artificial Sequence
  Synthetic
agactatcgataataggaggtagacc

SEQ ID NO: 407 - DNA, 33 bp, Artificial Sequence
  Synthetic
agacaattgaagcaggctagccaggagttccat

SEQ ID NO: 408 - DNA, 31 bp, Artificial Sequence
  Synthetic
agaattccaccccccactaaggaggtttttt

SEQ ID NO: 409 - DNA, 22 bp, Artificial Sequence
  Synthetic
ctaaattcccccgaggtcaata

SEQ ID NO: 410 - DNA, 29 bp, Artificial Sequence
  Synthetic
agagcttcaccctacaaggaggatataga

SEQ ID NO: 411 - DNA, 35 bp, Artificial Sequence
  Synthetic
agacgcccgcaacattttattttaaggacgaccca

SEQ ID NO: 412 - DNA, 42 bp, Artificial Sequence
  Synthetic
agataacccaatccgtaaggacacacgtcaaggaggcgattt

SEQ ID NO: 413 - DNA, 29 bp, Artificial Sequence
  Synthetic
agagcacatcagacctaaggaaaatataa

SEQ ID NO: 414 - DNA, 26 bp, Artificial Sequence
  Synthetic
agagttcatcagtttattaggaaaat

SEQ ID NO: 415 - DNA, 41 bp, Artificial Sequence
  Synthetic
accctgccatttttttagcccaaagaacacggagcatcttt

SEQ ID NO: 416 - DNA, 26 bp, Artificial Sequence
  Synthetic
agatcatttccaataagggggacact

SEQ ID NO: 417 - DNA, 26 bp, Artificial Sequence
  Synthetic
agacaccgaaacctaaggagggatat

SEQ ID NO: 418 - DNA, 25 bp, Artificial Sequence
  Synthetic
agaccaaacaattaggaggacaaat

SEQ ID NO: 419 - DNA, 20 bp, Artificial Sequence
  Synthetic
agaactaaggaggttagagg

SEQ ID NO: 420 - DNA, 24 bp, Artificial Sequence
  Synthetic
ttcaatcgttaaggaggtacataa

SEQ ID NO: 421 - DNA, 26 bp, Artificial Sequence
  Synthetic
agaggaacggataaggaggtcaatat

SEQ ID NO: 422 - DNA, 44 bp, Artificial Sequence
  Synthetic
agacgtcactatcaaacacactaataccacataaggagcgaaca

SEQ ID NO: 423 - DNA, 20 bp, Artificial Sequence
  Synthetic
agacacagggaggtctttat

SEQ ID NO: 424 - DNA, 17 bp, Artificial Sequence
  Synthetic
cacaagggggtagtagt

SEQ ID NO: 425 - DNA, 30 bp, Artificial Sequence; identical to SEQ ID NO: 205
  Synthetic

SEQ ID NO: 426 - DNA, 22 bp, Artificial Sequence
  Synthetic
atataaagttaaggagttgcac

SEQ ID NO: 427 - DNA, 34 bp, Artificial Sequence
  Synthetic
agaaatcacattacgcatagggggaggtagacac

SEQ ID NO: 428 - DNA, 23 bp, Artificial Sequence
  Synthetic
agacgaatataaggaataaaata

SEQ ID NO: 429 - DNA, 30 bp, Artificial Sequence
  Synthetic
agagccttccacaaactaaggagcacaatt

SEQ ID NO: 430 - DNA, 21 bp, Artificial Sequence
  Synthetic
agaaaaacgaggaggtaatag

SEQ ID NO: 431 - DNA, 25 bp, Artificial Sequence
  Synthetic
agaggcggtattaagggggccagag

SEQ ID NO: 432 - DNA, 25 bp, Artificial Sequence
  Synthetic
agaaatattacaacgaggtaaaggc

SEQ ID NO: 433 - DNA, 25 bp, Artificial Sequence
  Synthetic
agagcattccataaggagaaatttt

SEQ ID NO: 434 - DNA, 34 bp, Artificial Sequence
  Synthetic
agacacactcgaattactcaaaggacctctagca

SEQ ID NO: 435 - DNA, 34 bp, Artificial Sequence
  Synthetic
agccacactcgaattactcaaaggacctctagca

SEQ ID NO: 436 - DNA, 41 bp, Artificial Sequence; identical to SEQ ID NO: 209
  Synthetic

SEQ ID NO: 437 - DNA, 90 bp, Artificial Sequence; identical to SEQ ID NO: 210
  Synthetic

SEQ ID NO: 438 - DNA, 117 bp, Artificial Sequence; identical to SEQ ID NO: 211
  Synthetic

SEQ ID NO: 439 - DNA, 70 bp, Artificial Sequence
  Synthetic
tccggcaaaaaagggcaaggtgtcaccaccctgccctttttctttaaaaccgaaaagattacttcgcgtt

SEQ ID NO: 440 - DNA, 53 bp, Artificial Sequence; identical to SEQ ID NO: 213
  Synthetic

SEQ ID NO: 441 - DNA, 57 bp, Artificial Sequence
  Synthetic
ctcggtaccaaaaaaaaaaaaaaagacgctgaaaagcgtcttttttttttttggtcc

SEQ ID NO: 442 - DNA, 47 bp, Artificial Sequence; identical to SEQ ID NO: 214
  Synthetic

SEQ ID NO: 443 - DNA, 252 bp, Artificial Sequence; identical to SEQ ID NO: 215
  Synthetic

SEQ ID NO: 444 - DNA, 75 bp, Artificial Sequence; identical to SEQ ID NO: 216
  Synthetic

SEQ ID NO: 445 - DNA, 78 bp, Artificial Sequence
  Synthetic
agccccatagggtggtgtgtaccacccctgatgagtccaaaaggacgaaatggggcctctacaaataattttgtttaa

SEQ ID NO: 446 - DNA, 72 bp, Artificial Sequence
  Synthetic
atgtcatattaccaccatcaccatcatcacgactatgatattcccacaagcgagaacttgtactttcaaggg

SEQ ID NO: 447 - DNA, 42 bp, Artificial Sequence; identical to SEQ ID NO: 217
  Synthetic

SEQ ID NO: 448 - DNA, 30 bp, Artificial Sequence
  Synthetic
atgtcatattaccaccatcaccatcatcac

SEQ ID NO: 449 - DNA, 33 bp, Artificial Sequence
  Synthetic
tccattacaagccaccatcaccatcatcacggt

SEQ ID NO: 450 - DNA, 39 bp, Artificial Sequence; identical to SEQ ID NO: 218
  Synthetic

SEQ ID NO: 451 - DNA, 57 bp, Artificial Sequence; identical to SEQ ID NO: 219
  Synthetic

SEQ ID NO: 452 - DNA, 51 bp, Artificial Sequence
  Synthetic
cgactggttccgcgtggtagctattacgactccattcccacaagcgagaac

SEQ ID NO: 453 - DNA, 369 bp, Artificial Sequence
  Synthetic
atgtcatattaccaccatcaccatcatcacgggtccctgcaggactcagaagtcaatcaagaagctaagccagaggtcaagccagaagtcaagcctgagactcacatcaatttaaaggtgtccgatggatcttcagagatcttcttcaagatcaaaaagaccactcctttaagaaggctgatggaagcgttcgctaaaagacagggtaaggaaatggactccttaagattcttgtacgacggtattagaattcaagctgatcaggcccctgaagatttggacatggaggataacgatattattgaggctcaccgcgaacagattggaggtcatcaccatcaccaccatggatatgatattagcacaggt

SEQ ID NO: 454 - DNA, 387 bp, Artificial Sequence
  Synthetic
atgtcatattaccaccatcaccatcatcacgggtccctgcaggactcagaagtcaatcaagaagctaagccagaggtcaagccagaagtcaagcctgagactcacatcaatttaaaggtgtccgatggatcttcagagatcttcttcaagatcaaaaagaccactcctttaagaaggctgatggaagcgttcgctaaaagacagggtaaggaaatggactccttaagattcttgtacgacggtattagaattcaagctgatcaggcccctgaagatttggacatggaggataacgatattattgaggctcaccgcgaacagattggaggttgcatgtcatattacgactccattcccacaagcgagaacttgtactttcaagggtgc

SEQ ID NO: 455 - DNA, 402 bp, Artificial Sequence
  Synthetic
atgtcatattaccaccatcaccatcatcaccgactggttccgcgtggtagctattacgactccattcccacaagcgagaacgactcagaagtcaatcaagaagctaagccagaggtcaagccagaagtcaagcctgagactcacatcaatttaaaggtgtccgatggatcttcagagatcttcttcaagatcaaaaagaccactcctttaagaaggctgatggaagcgttcgctaaaagacagggtaaggaaatggactccttaagattcttgtacgacggtattagaattcaagctgatcaggcccctgaagatttggacatggaggataacgatattattgaggctcaccgcgaacagattggaggctccattacaagccaccatcaccatcatcacggt

SEQ ID NO: 456 - DNA, 288 bp, Artificial Sequence; identical to SEQ ID NO: 220
  Synthetic

SEQ ID NO: 457 - DNA, 1080 bp, Artificial Sequence
  Synthetic
atgaaaccagtaacgttatacgatgtcgcagagtatgccggtgtctcttatcagaccgtttcccgcgtggtgaaccaggccagccacgtttctgcgaaaacgcgggaaaaagtggaagcggcgatggcggagctgaattacattcccaaccgcgtggcacaacaactggcgggcaaacagtcgttgcttattggcgttgccacctccagtctggccctgcacgcgccgtcgcaaattgtcgcggcgattaaatctcgcgccgatcaactgggtgccagcgtggtggtgtcgatggtagaacgaagcggcgtcgaagcctgtaaagcggcggtgcacaatcttctcgcgcaacgcgtcagtgggctgatcattaactatccgctggatgaccaggatgccattgctgtggaagctgcctgcactaatgttccggcgttatttcttgatgtctctgaccagacacccatcaacagtattattttctcccatgaggacggtacgcgactgggcgtggagcatctggtcgcattgggtcaccagcaaatcgcgctgttagcgggcccattaagttctgtctcggcgcgtctgcgtctggctggctggcataaatatctcactcgcaatcaaattcagccgatagcggaacgggaaggcgactggagtgccatgtccggttttcaacaaaccatgcaaatgctgaatgagggcatcgttcccactgcgatgctggttgccaacgatcagatggcgctgggcgcaatgcgcgccattaccgagtccgggctgcgcgttggtgcggatatctcggtagtgggatacgacgataccgaagatagctcatgttatatcccgccgttaaccaccatcaaacaggattttcgcctgctggggcaaaccagcgtggaccgcttgctgcaactctctcagggccaggcggtgaagggcaatcagctgttgccagtctcactggtgaaaagaaaaaccaccctggcgcccaatacgcaaaccgcctctccccgcgcgttggccgattcattaatgcagctggcacgacaggtttcccgactggaaagcgggcag

SEQ ID NO: 458 - DNA, 1224 bp, Artificial Sequence
  Synthetic
atgtcatattaccaccatcaccatcatcacgactatgatattcccacaagcatgaaaatcgaagaaggtaaactggtaatctggattaacggcgataaaggctataacggattggctgaagtcggtaagaaattcgagaaagataccggaattaaagtcaccgttgagcatccggataaactggaagagaaattcccacaggttgcggcaactggcgatggccctgacattatcttctgggcacacgaccgctttggtggctacgctcaatctggcctgttggctgaaatcaccccggacaaagcgttccaggacaagctgtatccgtttacctgggatgccgtacgttacaacggcaagctgattgcttacccgatcgctgttgaagcgttatcgctgatttataacaaagatctgctgccgaacccgccaaaaacctgggaagagatcccggcgctggataaagaactgaaagcgaaaggtaagagcgcgctgatgttcaacctgcaagaaccgtacttcacctggccgctgattgctgctgacgggggttatgcgttcaagtatgaaaacggcaagtacgacattaaagacgtgggcgtggataacgctggcgcgaaagcgggtctgaccttcctggttgacctgattaaaaacaaacacatgaatgcagacaccgattactccatcgcagaagctgcctttaataaaggcgaaacagcgatgaccatcaacggcccgtgggcatggtccaacatcgacaccagcaaagtgaattatggtgtaacggtactgccgaccttcaagggtcaaccatccaaaccgttcgttggcgtgctgagcgcaggtattaacgccgccagtccgaacaaagagctggcgaaagagttcctcgaaaactatctgctgactgatgaaggtctggaagcggttaataaagacaaaccgctgggtgccgtagcgctgaagtcttacgaggaagagttggcgaaagatccacgtattgccgccaccatggaaaacgcccagaaaggtgaaatcatgccgaacatcccgcagatgtccgctttctggtatgccgtgcgtactgcggtgatcaacgccgccagcggtcgtcagactgtcgatgaagccctgaaagacgcgcagactcgtatcaccaagtcgtactaccatcaccatcaccatcacggcggtagtggcgaaaacctgtattttcagggt

SEQ ID NO: 459 - DNA, 756 bp, Artificial Sequence
  Synthetic
atgaaaaacataaatgccgacgacacatacagaataattaataaaattaaagcttgtagaagcaataatgatattaatcaatgcttatctgatatgactaaaatggtacattgtgaatattatttactcgcgatcatttatcctcattctatggttaaatctgatatttcaatcctagataattaccctaaaaaatggaggcaatattatgatgacgctaatttaataaaatatgatcctatagtagattattctaactccaatcattcaccaattaattggaatatatttgaaaacaatgctgtaaataaaaaatctccaaatgtaattaaagaagcgaaaacatcaggtcttatcactgggtttagtttccctattcatacggctaacaatggcttcggaatgcttagttttgcacattcagaaaaagacaactatatagatagtttatttttacatgcgtgtatgaacataccattaattgttccttctctagttgataattatcgaaaaataaatatagcaaataataaatcaaacaacgatttaaccaaaagagaaaaagaatgtttagcgtgggcatgcgaaggaaaaagctcttgggatatttcaaaaatattaggttgcagtgagcgtactgtcactttccatttaaccaatgcgcaaatgaaactcaatacaacaaaccgctgccaaagtatttctaaagcaattttaacaggagcaattgattgcccatactttaaaaattgataa

SEQ ID NO: 460 - DNA, 609 bp, Artificial Sequence
  Synthetic
atgagcccgaaacgtcgtacccaggcagaacgtgcaatggaaacccagggtaaactgattgcagcagcactgggtgttctgcgtgaaaaaggttatgcaggttttcgtattgcagatgttccgggtgcagccggtgttagccgtggtgcacagagccatcattttccgaccaaactggaactgctgctggcaacctttgaatggctgtatgagcagattaccgaacgtagccgtgcacgtctggcaaaactgaaaccggaagatgatgttattcagcagatgctggatgatgcagcagatttttttctggatgatgattttagcatcggcctggatctgattgttgcagcagatcgtgatccggcactgcgtgaaggtattctgcgtaccgttgaacgtaatcgttttgttgttgaagatatgtggctgggtgtgctggtgagccgtggtctgagccgtgatgatgccgaagatattctgtggctgatttttaacagcgttcgtggtctgacagttcgtagcctgtggcagaaagataaagaacgttttgaacgtgtgcgtaatagcaccctggaaattgcacgtgaacgttatgcaaaattcaaacgt

SEQ ID NO: 461 - DNA, 1344 bp, Artificial Sequence
  Synthetic
atgtttatagagcagatgtttccatttattaatgaaagtgtaagagttcaccagcttcctgagggcggcgtgttagaaatcgactacttgcgcgataatgtctccatttctgactttgagtatttggatctcaacaaaacggcttacgagctctgcatgcgcatggatggccaaaaaacagctgagcagattttagctgagcaatgtgcagtgtatgatgaatcaccggaagatcataaagattggtattacgacatgctcaacatgctccagaacaagcaggttattcagcttggaaaccgggccagccgccatacaatcaccacgagcggaagcaatgaatttccgatgcccctgcacgccacctttgaactgacgcaccgctgtaatttgaaatgcgcccactgttatttggaaagctcacctgaagcgctcggcaccgtgtcgattgagcaattcaaaaaaacggctgatatgctgtttgataacggtgtattgacatgcgaaatcacaggtggagaaatttttgtccatccaaacgccaatgagattcttgactatgtgtgtaaaaagttcaaaaaagtcgctgtcttaacaaacggaacactcatgcgaaaagagagcctggagcttttgaaaacttacaagcaaaaaatcatcgtcggcatttctctagatagtgtcaattccgaggtccatgactcctttagagggagaaaaggctcttttgcccaaacttgtaaaacgataaaattgttgagtgaccacggtatatttgtcagagtcgctatgtctgtattcgaaaaaaacatgtgggaaatccacgatatggcccaaaaggttcgggatctcggggcgaaggcgttttcttacaattgggttgacgatttcggaagaggcagggatattgtccatccaacgaaagacgccgagcagcaccgcaagtttatggaatacgagcaacatgtgattgatgagtttaaagatctgattccgattattccctatgagagaaaacgcgcggcaaattgcggcgctggctggaagtccattgtgatcagtccgttcggcgaagtacgtccttgcgccctctttccaaaggaattttcattgggaaatatttttcatgattcctatgaaagcatctttaactcccctctcgtccataaactgtggcaagcgcaagcgccgcggttcagcgaacattgcatgaaagacaaatgcccgttcagcggctattgcggaggctgttacttaaaagggctgaactctaacaaatatcaccggaaaaacatttgctcttgggcgaaaaatgaacaattagaagatgtggtccagcttatt

SEQ ID NO: 462 - DNA, 729 bp, Artificial Sequence
  Synthetic
atgcctgagcttccccgtttcgcgacggcccctcgtcacgtgcgtgccctggatttcggtcatgttctggtcctgatcgattaccgttccaatcacgtccagtgcctgcttccggcagccgcagcccattggacagccacagcgcgtaccggccgcttggacaccatgccggcagcgctggccacccagttactgacatcggcgttattagtaccgcggccgaccgcaacaccgtggacggcacctgtagcggcaccacctgctccaccgtcatggggtggatccgagcatcctgccgggacatcacgccctcgggcacgtcatcggcactcaaccacggctgcggcggcgctggcatgtgtgctggcgattaaggcagcaggcccaacccgctatgctatgcagcgcttgaccacggtcgtgaaggcagccgcttctacgtgccgtcgcccggcaacgccagcacaagcgacggctgctgcgcttgcggtccgtcaggcatgctggtactcgccagcgcgtacagcctgtctggaagaatccgccgcgactgtcattttactcgctacccggcgtttgagttcgacatggtgccatggagtagctcccgatccgattcgcctccatgcctgggtggaaactgaggatgggacacctgtagcagagccagcctcgacccttgcgtacaccccggccttaaccattggaggccaccatcaacaccagcct

SEQ ID NO: 463 - DNA, 1818 bp, Artificial Sequence
  Synthetic
atgatctttggtggattttcgacgacccgtgaagttcgtcaacgccctggtaatgccgagtttattgctacggactcgcctatttggcgcctcggtcgtagtccagctcgttgcgtggctgcggaccatggacagcgtcgcctggtagtgttgggagaatgcggggcaacggatggcgaattatctcgcctggcgaccgcggggctgcccacggatattacctggcgctggccaggcgtgtacgtggtggtcgaagaacaaccggaacgtacggtgctgcacactgatccagcagctgcactcccggtatacgcaaccccttggcaaggcggctgggcatggtcaaccagcgcgcgcatcctggcacgtttaacagaagctccaattgatggtcaacgcctggcatgttcagtgctggccccgtctgttccggctctgagcggtacccgcacattctttgcgggtatcgaacaattggccctgggttcgcgtattgaactgccggtggatgggtcccgtctgcgtgttacggtacgttggcgcccggatccagtcccgggagaaccatatcatcgcttgcgcacagcgttgaccgaggcggtcgccctgcgtgtcaaccgcgcaccagacctgtcatgcgacctctcgggcggcctcgattccacgtcactggcagtcctggcggctgtgtgcttaccggagtcccaccatctgaatgctatcacgattcatccggagggcgatgaaagtggcgcggacttacggtatgcgcgcttggcagctgcgcaccacgggcgtattcgccaccaccttctcccccttgcggcagaacacctgccgtatactgaaattacggcggtgccccctaccaccgaaccggcaccttcaacattaacgcgtgcacgcctcgcgtggcagttagattggatgcgccagcacttaggcagccgcacccatatgactggcgatggaggcgacagcgtactgttccaaccgccggcacatctggcggatctcctgcggcatcggcagtggcgtcggactttgtcggaaagtttgggatgggcacgccttcgccatacgtctgttttacccttactgcgtggagcagcaactcttgcacgtacatcacgtcggtcgggcctccaggatctcgcacgcgcattggcgggtgcaggtcagcagggcgatggtcgtggcaatgtgagctggttcgcaccattaccgctgcctggctgggcgaccccaaccgctcgtcgcttactgcttgatgcagccgatgaagctatctcgaccgcggatccgttaccgggactggatacgtcgctgcgcgtactgatcgatgaaattcgcgaagtcgcccgcacggcagcggcagatgccgaactggcggatgctcacggaacgactctgcataacccatttctcgatccgcgcactattgatgcagtcctgcgcacgccaatcgcacatcgcccggcggtccactcgtataagccagcgctggggcatgcaatgcaggatttgctcccgggtgcagtcgctcggcgctcaactaaaggctcttttaacgccgatcattatgcggggatgcgtgcaaatctgccagcattgacagcgctggcagatggccacctggccgacctgggtttgttggagccgacgcgcttccgcagtcatcttcgccaagccgccgcgggcattccgatgccgcttgcggcgatcgaacaggcgctgtctgccgaagcatggtgtcatgcacatcacgccaccccaagccctgcctggacaacgcagccaccggaacacccgcatgcc

SEQ ID NO: 464 - DNA, 606 bp, Artificial Sequence
  Synthetic
atgagcacgtcccccgaacagaccctctggatctcaactgatacctgtggtctggggccgtatcgcgctgacttggtggatacctattggcagtgggaacaagacccaacattgcttgtaggctacggtcgtcagtcaccgcagtcactggaggcccgcacggaaggtatggcccaccaattgcgtggcgataacatccgtttcactatctatgatctgtgcagcagtacacctaccccggcgggcgtggcaacgctgctgcccgatcatagcgtccgtactgccgagtatgttattatgcttgcgcctgaagcacgtgggcgtggcttaggaaccaccgccacgcagctgacgttagattatgcgtttcacatcaccaatctgcggatggtctggttgaaagtactggcgccgaacaccgcgggcatccgtgcgtatgagaaagctggctttcgtacagttggagcgcttcgcgaagccggctattggctggggaaggtctgcgatgaggtactgatggatgccttagcgaaagacttcacgggtccaagtgcagtccacgcagcattaactggcgccagcggtcgccagctgcgccgtgcacct

SEQ ID NO: 465 - DNA, 969 bp, Artificial Sequence
  Synthetic
atgaacgttctgattataacgcattcccacgataacgagagcatttcattggtaacccaagccattgaatcccagggtggtaaagcatttcgcttcgataccgatcgttttccgacggaagtccagctggacatctattactcaaatacagagaaatgcgtgctggtggctgacgatcaaaaactggatttaaatgaagtaaccgcggtctggtatcgccgcattgcgatcggtggcaaaatcccgcccacgatggataagcaacttcgtcaggcctcgattcaggagagtcgtgctacaattcaaggcatgatagcgagcattcgcggctttcaccttgacccagtgccgaacattcgtcgcgctgaaaataagcaactgcagctgcaggttgcccgcaaaatcggactggataccccacgcactctcaccactaataatccgcaggccgtgaaggaatttgcggcagaatgccagcaggacgtaatcaccaaaatgctgagtagttttgcgatttatgatgagaaaggcggagaacaggtggttttcaccaatcccgtgaaatctgaggatctggaaaatttagaaggtctgcgcttttgccctatgacgtttcaagagaaaatcgcaaaggttctggagctccggatcaccatcgtgggtaagtcaattttaacggctgcggtgaattcacaggccctggacaaatcccgttatgattggcgcaagcagggcgtagcattactggatgcatggcagacccatacgttaccccaggacgtggctgataaattgcttcaactgatggcccatttcgggttaaactatggagccattgacgtgattctgaccccggataatcgctatgtgttcttggaggtcaatccggtgggcgaattcttttggcttgagcgttgcccaggtctgccgattagtcaagctattgctaaagtgctgctttctcatata

SEQ ID NO: 466 - DNA, 627 bp, Artificial Sequence
  Synthetic
atgtacgagctgaatgatggcgtaggtttggccctcgtggatcagcatccgatttttctggacctgaaaacagaccgttacctgtcgttgagtccagatggggcagcagtcctgctgggagcagcgccagccaccaaagagagtccactgtttctcggattagaatccattggcttggtcaaaaacggtccgtcaggccttaagccttgccaaattgccgtagccactgggtctgcaccgccccgtaaggtgcaattcgagtcgttgtcactcctgcttttgcgcttaattcgtgcacgtctggatcaacgtgctcttttgaagcgtgtgaccgacttaaagaaggccggcaccattgcccagacgaagaaccgtgactgcgccttgtcattattaggtagcgtggagactgaggcaaaggcttgtcgtacccttttaagtagtacagacaaatgcctgcccgacgcattcgcaattgcaacgcacctgcgccgtcgcggagtagacgccaagttagttttcggtgtgcgcctgccattcgcggcacatgcctgggtccaggtagatgatattgtagtgggtgatcgtcccgaccgtatccttgcgttcacccccatcttagtcgtt

SEQ ID NO: 467 - DNA, 1716 bp, Artificial Sequence
  Synthetic
atgcgctatgtcgcgtctttctttgttcgcggacatgtcagcacaccagcactgcgtcacccagagccaaagggtttcgcttatgcaaaagtcagtggcggactgagcgtatggagcgatgcgccgattcgtcaccgtgcgccccttattacagtgggcgcggtgttcgatcgcgcgtcttttaaagggctggattgcgacttatcaggtctgcgtcaggatggtcttaatacattgaaagcggaaacgttcggaccctacctggcgttagaggttgccgataacggcacccttcgcgtttatcgcgatccgtcaggcggcgcgccttgctattacctgcagaccgaggacggcttctggcttgcaagcgatgctgatttgttattcactcattcgggcgtacatccatcagtaagcttaccgggactgattgaacacttgcgtcgtccagagttccaaaatgagggcacatgcttaaacgtcaagcaagtacgccctggggagcaggttgatttatcgctctcgggcgaggtccgtgcctgtttgttcccgcctgcatcatccctgcgcccgcctgagttgcaccgcgcatacgatgacattaaggctgagctgcgcgctctgattttacgcagcattaaggcctatgccagtgatttccctcacgttgttgttagcttcagcggtggtctggatagcagtgttgttgcggccggcttagcgcaaacttccactaaggtcctgcttcacacctttaagggcccagatgccaaaggggacgagactgccttcgccgcagaatgcgcggcatatctgggtttaagcttagagattgatactctcagtatcgatgacgttgatctgtcggcaactatttccccgcacctgccgcgccccagcacatcattcttcttgccatcactgctgcgcggtttctctacctcgagccaaacgcgcacaggcggggcaatcttttcgggaaacggcggtgactcggtcttttgtttcatgcatagcgcgaccccgctggccgatttgatgtgtcgtccgtcaggtcttacgccgttcatgcaaacatgggccgacgtgcaaaagcttacccgtgcctcagcgaccgaagtgctgcgtcgcgcgttaaagacagccatggcgcgtggctacatctggcctgaatccaatctcctcttgtcccgcgacacaagctcgagccgtttaacacctgactccgttctgtcgagccttgaggggattctgcccggtcgcttgcgtcacctcgccctgattcgtcgtgctcacaacaccttcgagccattcgccccttggcgtacgccgccagtcgttcaccctctcatggccaagccgattcaagccttctgcctttctcttccttcatggatgtgggtcagcggtggtaaagaccgctcgctcgtgcgtgacgcgttcgaaggattacttccagattcagtgcgccttcgtaaatcaaagggaagtcctgcaggctttctgcatgcgctgtaccgcgccaagggtcgtcaaatgattgagcgtatccgtcacggttacctgcgtcgtgaggggatcatcgatatctctactggcccggacgcattgttctcggaagggttccgcaatccgcgtgtaatgcaccgtttctttgagctcgccgcaactgaggtgtggatcgatcactggcgcaactggcgccgcccccgcaca

SEQ ID NO: 468 - DNA, 1836 bp, Artificial Sequence
  Synthetic
atggaagggttgtatcagctgaaagtgcatagtcgtatacacaaactgcaaaataatatcgcaataggtagcatgccgcctcacgcgctgatcatcgaggatgcccccgaatatttgtcaaacgttctgcgcttctttagtagcaaaaagactataaaagaagctgaagtgtacctgtcggataatacgaatctgagctccaatgagatcaacctgttgttaggtgatctgattgagaacgagattatcgtaaagcaaaactacgactcgaataatcggtacagtcgacacagtctgtattacgagatgattgatgccaacgctgaaaacgcgcagaaaattctggcagagaaaacagtgggcctcgttgggatgggcgggattggttccaatgtagccatgaatctcgcagccgccggtgttggcaaactgatctttagtgatggcgataccatagaactgtctaatttaacgcgacagtatctttacaaagaggatcaggtgggcttgagcaaagtagagagcgccaaagaacaactgcaattactgaatagcgaagtcgagcttatcccggtttgcgaaagtatctctggtgaggaactgttcgacaaccatttctccgaatgcgatttcgtcgtactgtccgccgactctccgttctttgttcacgaatggattaacaatgccgcgttgaaatatggcttctcctactctaacgcaggatatatcgaaacctatggcgcgatcggtccactggtgatacctggggaaactgcctgctacgaatgctataaagacaagggcgatctttacttgtactccgacaacaaggaagaattttctgtgaacctgaatgaatcattccaagcaccgagctatggaccgcttaatgcgatggttagttccattcaggcgaatgaagtgatacgccacctcctcggacttaaaaccaaaacgtccggcaaacggctgctgatcaacagtgaaatctacaaaatccacgaagagaacttcgagaagaagaacaactgcctgtgctcggatattaagggcgagaagctgtcgaagaacacccttaactccgataaagagctgcacgaagtgtatatcgaagaacgcgaatcggattctttcaactccattctcttggataaaaccatgagcaagctggtaaaaattaacaaagaggagacaaaaatcctcgacattggttgcgctaccggcgaacaggctctgtatttcgcgaataaaggtgctaaggtgaccgctgtcgacatttcagacgatatgttgaaggtgctggacaagaaagcaagcaacattaacgcggggagtatcaaaaccatgcgtggtaatatcgaatccatcgaggtgaatgacacttttaattacatcgtctgtaacaacatccttgattacctgccggagatcgaccgcacgctgagaaaacttaacatgtttttgaaaaatgacgggacgctgattgtgacgattccccaccccgtgaaggatggtggagggtggcggaaagattattataacggcaaatggaactacgaagagtttatcctgaaggattacttcaacgagggtctgatcgaaaagagccgcgaggacaaaaatggggaaacggtgatcaaaagcattaaaacgtaccacagaaccaccgaaacctatttcaatagctttactgacgctggcttcaaggtagtatctctgctggaaccgcaaccgctttcaactgtttcagagactcatccaattctgttcgaaaagtgttcgcgcattccgtactttcaagtttttgtgctcaagaaagaggatcgccacgccatt

SEQ ID NO: 469 - DNA, 3054 bp, Artificial Sequence
  Synthetic
atgatcaaaaatgtaaacctcaaagaggccattaaaggtttgaccgtatcagaacgttatgacactctgaaaaattcgggagtcaacctgaatctgaacatttcggctttggaagagtggcgcaaccgtaagaatcttttagccgatgaggactttacggagatgctgacggtgctggaatatgacccggtgtattttagccacgcgattaacgagaacatcgaagaacatatcgatatctacaagagcaaaattctgggggaaaactggtttatcgtgctgaacgatattctggacgagctcgataatcccatcgaatacaagaaagagatgaatcacagctacctcctgcgtccgttcttgctctacgccgaaaaggagatgaacaaatacattgtcaatcgtaaggagttacttccggtggaaccccaggtcatccaacagatcatggaaaatttggcctccaaactgttcgccgtttctgtgaaaagctttgtcctggagctgaatatttcgaaattgaaggacgaactggccggcgaaacaccggacgaacgctttcactcatttattcgtttgatgggtgagaaaacgcgcctggtggacttttacaacgaatatatcgttctgagtcgtattctggtgaacatcacgatcttattcgtcaacaacattattgagctgtttgagcgcctgcaggaatccaagctggatattgttaagaaacttggcgtgcaggaggagttcaaaatcagtaatattagcattggcgaaggtgatacacatcagcaaggacgctcggttatcgttcttacgttcgtgagtggaaagaaagtggtgtataaaccaaaaaatctgaaagttgtttctgcttataattctttaattgactggatcaacaataaaaataatattctgaaaatgccttcgtataacacattgatttatgatgatttcgtgatcgaggagtttgtcgagaaacgtgactgcaaaagtatcgaggaggtcaaaaaatattatattcgttatgggcaaattttggggattatgtatatcttaaatgggaacgattttcatatggaaaacctgattgcctcgggtgaatatccgatcattgttgacttggaaacgctgcttcagaacattatcaattttaaaaacaaaccatcagcggacttgatcaccaccaaaaagatgcttaacctggtaaacagtactctgctgctccctgaaaaacttctgaagggcgacatcacggacgaaggaatcgacatgtcagccttggcagggaaagaacaacacttggaacgccgcgaataccagttgaaaaacctgttcaccgacaacatggtttttgatctcgaaaaagtgaaaatcgaaggtgcgaacaacatcccgaaattaaacggtgaaaacgttgactacagcacctatattgatgagattgtggttgggttcgaaaatatctgtaacctgttcattcaatatcgcgacgagttactgcattccggcatcctggaggagtttaaagatgtgaaggttcgtcatgtgcttcgcaatacggttgtttatgctaagatgctggcgaatacatatcatccagattacctgcgtgattcgttgaatcgcgaacaggttcttgaaaacatttgggtgcatccgtttgagcgcaaagaattcattaagagcgagatggaagatatcctcaacaacgacatcccgatctttttctcatacgcgtcgtctaaggatattatcgattcgaatggcaaactgcacaaaaacgttatggaaatttcgggttacgaacgttttaccaccaaactgaaggaactgaatccctttctgattgaacagcaggtgagcgttattaatattaaaaccggccgctatggggataagaaattcgaaaaaaattatagcgtgcgcgacgttgcaacggagaaaaaagataatccgattgatttcctgcaggaggcaatgaatatcggcgataaaattttggaacatgctatcatctgtgatgagaccaaaacgatttcgtggcttaccattaacaaccatcatgataaaaattgggaaattgggcctatttccggtgaattttatgatggtctggcgggaatttcactcttctaccactacctctataaaaaatcccacaatgtcgagtataaaaaaattcgtgattacgcgttcaacatggcgaaagtcaaagccctgtcactgaaatacgatagtggcttgaccggttacgcttccttgctgtatacggcacacaagattgttcaggatgaaccgcggaagcaatacaaagacgtgatcaacgaagtgttcaagtacattgatgagagcaaagtcgtgaccgctaagtataactggttgcatggcactgcctctattattcatgtgttattgaacctctacgaggactctcgtgatatggcgtacctgactaaatgtattcagtacggcaaatatttggtcaagcaaatcaaagaacacaaggatatgcttgcgcctggctttagccagggcatctcttcggtcattatggttctggtgcgcttaagtaaaaagtgtgaagtcgaagaatttctcgaattagctctggaattaatggaaatggaacgcaacaaactgggaaacctttctgaatcaaactggctgaacggcttggtgggcattggcttatcacgtatcaaactgaaaggactggattccaacttacaggtcgacaacgacatcgaactcgtcctggatggcgtcatgaacagcttgtactcaaaagatgatactttgagctgtggtaactctggcacagtggaattgttcctgagtctgtttgaacagacgaaaaagaaagagtatctggatatggcgaaagcaatctgcgggaaaatgatcgaagagagtcgcatctcctttgagtatcagacaaagagtctgccgggtttagaactggtgggcctctactctggcttagccggaattggttatcaattcttacgtatctcggacgttgaggatattgcgagcattgctaccttagat

SEQ ID NO: 470 - DNA, 987 bp, Artificial Sequence
  Synthetic
atgcagccagacctggaggttgttgatgttcgtcgcggcgagtcgttcaaggcatggtcgcatgggtacccatatcgcactgttcgctggcacttccatcctgagtttgaagtacatctgatcgtggaaaccaccggccagatgtttgtgggtgattatgtcggaggctttggtccgggtaatctggtcctgatgggtcccaatctgcctcataattgggtgtctgacgttcctgagggtaaaaccgttgcagagcgtaaccttgttgttcaatttgggcaagcgttcgtttcccgttgcgaggattccttaacggagtggcgtcacgtggaaacgttactggcggatgcgcggcgtggcgtgcaatttgggccgcgcacctctgaggccattaaacctctgttcgcggaactgattcacgcgcgcggcctgcgtcgcattgtgctgtttctgtctatgctgcaaatcctcgtcgatgcaacggatcgcgaactgctggcatctccagcttatcaggcggatccttcgacatttgcaagcacgcgcattaatcatgcgctggcctacattggaaagaatctggcgaacgagcttcgtgaaacagatttagcacggctggccggacagtctgtttccgccttctctcattattttcgtcgtcataccggcctgcctttcgtgcagtacgttaatcgcatgcgtatcaacctggcctgtcagcttctgatggacggggacgcatcggtgacagatatttgtttccgtagcggttttaacaacctgtccaattttaaccgtcagtttctggcagtgaaaggtatgtcacccagtcggttccgtcgctaccaggctctcaacgacgcgtcacgtgatgcgagtgaagcggctgcaaaacgcggcgcaggtattgcaggtgcaccggcaatcgttccagcggctcaagcacgtggcgaggcacgcccaattcctgaagtgctgcttagcggc

SEQ ID NO: 471 - DNA, 945 bp, Artificial Sequence
  Synthetic
atgatgctgacggcgagctccacaccggcatccggtaatccagctgcccgtgcattgcgcgccgctgcctttgcactggccttaggcggagcatgcgttgcgcatgccgcacctctgcggattggcatgacattccaagaattgaataacccgtattttgtgaccatgcagaaagcactgaacgaagccgcggcgagcattggcgcgcaagtgattgtaacagacgcacatcacgacgtgtcaaaacaggtatcagacgttgaggatatgctgcagaagaaaattgatattttactggtgaatccaaccgactccacgggcatccagagtgcgattgtttccgcaaagaaggctggcgccgtggtcgtggcggtcgatgccaatgccaatggcccggtggattccttcgtagggtccaagaattttgatgccggcgctatgtcatgcgagtaccttgcgaaagcgatcaacggcggcggcgaagtggccattctggatggcatcccggtcgtcccaatcctggaacgtgtccgcggctgccgcgcggcactggccaaattcccgaatgtgaaaattgtcgacgttcagaatggaaaacaggaacgtgcgacagcgttaacggtaaccgagaatatgatccaggcgcacccgaaactgaaaggtgtgtttagtgtaaacgacggcgggtcaatgggcgctttgagcgccattgaagcgagcggcaaagatatccgcctcacgtccgtagatggtgccccagaggcggtggcggcgattcaaaagccgaactccaaatttattgaaacaagcgctcaatttccgcgcgaccagatccgtttagcgattggtattggcctggccaagaaatggggcgcgaacgtgccaaaagcgattccagtcgacgtgaaactgattgacaaagggaacgcgaaaacctttagttgg

SEQ ID NO: 472 - DNA, 981 bp, Artificial Sequence
  Synthetic
atggctctcaaaacctgcgaagaatttctgcgcgatgcgttagatccggatcgcttcggccgcgagatgaaggcagtaacagaaattcccgagatcgttaaactcggccatcgtcatggttatggatttactgccgaagaatttctgaccaaagctatgagttttggtgctccgccggcaggagcagcagcacctggcgaatcagccagcgttcctggccagaacggttcctcccccggacacgctgcgcgtgcagctatggctggtccagaagcaggggccaccagctttgcccactatgaataccgtctggatgagctgccggaattcgcccccgttgtggccgagcttccgaaactgaaagtcatgccgccttccgtgggacctgatcggtttgcagcacgctaccgtgatgaagatatgcgcacaatttcaatgagtccggcggatccggcttaccaggcttggcaccaggaactggcgggtcgtggttggcgcgatgcagaagatacggctgctgctccagatgccccacggcgcgattttcatctgctgaacctcgatgagcatgtagattacccaggttatgaagaatattttgcggccaagacccgtgtcgtcgcggcactcgaaaacctgtttggtggtgacgtgcgttgctcaggctctatgtggtatccgccgtcgagctatcgcttatggcatacaaatgccgatcaaccggggtggcgtatgtacctggtagatgtagatcgcccattcgcggaccccgaccgtacctccttctttcgctacctgcatccacgtacccgtgaaatcgtcacgctgcgcgaaagccctcgtattgtccgtttctttaaagtcgaacaggatcccgagaagctgttctggcactgtatcgcgaaccccaccgatcgccatcgctggtcgtttggttacgttgttccggaaaactggatggacgccctccgtcaccatggc

SEQ ID NO: 473 - DNA, 636 bp, Artificial Sequence
  Synthetic
atgcctttatggttagcgcaggacgtccacgcggtcgctctggacgaagatatcgtggtgctggatgcggtgagcgacgcatacctgtgtttagttggtgccagcgctctgatcagcttgggcagcgagcgttccgtcagtgcagatccggtggccgctgagacacttcgtgaggctggtctggtgggtccacatcctagcggcgccacccgaccaatacctccgaagccgacgattgacttacctgatgcagcccgtcaggcgcaaggtcgtgaattacgtgccgccgcgtgggctggcgcggcaaccgcaatcgatttccgccggcgttcatttagacaactcctcgcgagagcagggcaacgcccgccgggtcaagcagctgctccggctgatgaggtattggcagcagccgcagtgttcatgcggttacgtccatggtcacccgttggaggcgcgtgccttatgcgttcgtattacttattacggcatttgcgcatcctcggtttcgatgccgattggatcattggtgtgcgtacgtggccatttatggcccattgctggctgcaggtcggtgccgtcgcactcgacgatgacgtcgagagattaacagcatacacaccgattctggcggtg

SEQ ID NO: 474 - DNA, 1749 bp, Artificial Sequence
  Synthetic
atgggcgactacctggctctgtactggccgcgcggcatgcccggtgtagctgcagacgcaatgcgggccgccatcgaagctgagggcgcctggaccctggcgttcgaggcctaccagctggtagtgtatgtcaaagggccccgagcacctaaagtgcgtgccctgccggatcagggcggggtggtcattggggaactgtttgatactgcagcaacccgcgaaggacgcgtgcaggactttcctatagcgctgatcaaagacgtcgcagctcaggatgccgcacgtattcttgctacccatgcgtggggtcgttatgtggctgtattaaaagccggtgatcgtccgccatggatctttcgcgatccaagcggggcggtggaatgtctggcgtgggtccgcgatgaagtgaccatcattagcagcgatgttgcagcgcaacgagcttggtcccctgatcggctggcgattgactggtcgggactgggacgtgtactggcacgcggaaacttatggggagaaatttgcccgctggctggcgtcacggcgattgcgccaggtaccgcacggtgtgatctcggtgatgcagctctgagcctgtggcgcccaggagatcatgcacgtcgtagtcgtcatgatgtttccccacgtgatttggcaagagtggtggatgctagcgttgcagccctggctagagatcgcagcgctattctggtcgaaatcagcgggggactggattccgctatcgttgccacgtcgctggctcgttgtggagccccagttgttgctggaattaaccattactggcccgaaccggagggtgatgaacgtcgctgggcccaggacatcgcagatcggtgcggttttcgcctgatcgcgggccaacgtcagcggctgttgctggacgaggcaaagctgctgagacatgcacagggcccgcgacctggtctgaatgcgcaggacccggacctcgatcacgatctggcggaacaggctaaagcgttgggtgccgatgcactgttctcagggcaaggtggcgatggtgtgttctatcaaatggcaaatgctgcactggcagccgatatcctcatggggaaacctgctcctatgggtagagccgcgtctttagccgctgtggctcgtcgggcacgagccacggtctggagtttgtgcggccaggctatgtttccgtcgcgcgcatttgccgctggtatgccgccgccaagtttcttgagcgccggtttggcgccgccacccgtgcacccgtggattgcagaccagcgcggtgtttcaccggcgaaacgtattcaaattcgggggctgaccaatattcaatgtgctttcggcgatagcttacggggccgagcagcagatcttttatatccgcttatggcccaaccggtcatggaactgtgtctgtctatccctgcaccgctgttggcagtaggcgcattggatcgccctttcgcacgtgcggcgttcgcagatcgattacctcctcgttcactcgttcgacgctcaaaaggtgatgttaccgtgtttttcagcaaaagccttgcagcaagcctgccggcccttcgtcctttcctgctggacgggcgccttgcagaacagggtctgatcgatcgagcaaaactggaacctctgctgcaccccgaaccgatgatttggcgcgactcagtcggcgaggtaatgctggcagcgtatcttgaagcctgggtgcgcgcatgggaagccaagttgcgtgttagc

SEQ ID NO: 475 - DNA, 675 bp, Artificial Sequence
  Synthetic
atgactctgacctggcgcccgggtgttcacgcggtaatggtcgaagatgatctggttctgctggatgaagcagcggacgcttatgtctgtttgttggatggcgccaaagtggttagcgtccgggctgacggtgctctgagcttcaatcccccacatgcagcagaagatatgatcgcgggtggcctcgtcgaaccttcatcaagtgccgcggcgtcagcaaacccgccggcaaaactcccatgtactccgctggcgcgcttatcgcgcccgcggcatgtaaaagtgcgtccggctgaagcggccttgttcctgatccaagcctggggtgttgcgcgtgcggtacgtcgttggccaatggctagattattagaagcattacgtggagatcgtgccgcagaaccggcgaaaggccgccgatcgatggcggaggcgtgcgctgtttttgatgcgcttctggcctggagcccttttgacggtgaatgtttgtttcgctcagtattacgacgtagatttttaatggcactgggccattcgccggacttggtgataggcgtgcgtacctggccgttccgcgcacattgctggctgcagagcggagtggatgccctggatgattggccggaacggctctgcgcatatcgcccgattctggcagcttctgcaagccagggtaga

SEQ ID NO: 476 - DNA, 1704 bp, Artificial Sequence
  Synthetic
atgagttacctgctgatgacctggccgccggggcagccgagcgtagaagctgatgcacttcacgcagcctttaacgggcagggtggatggagcctggttttggaacgattctgcctgcgcgtatacgtgcgtggcgcggcagcccctgcagttacccttaccccgaaaggaggcgtgctcattggtgagatgtttgatcgggctgccacagaaacgggcgccgttgccgcttatgatctgagccgcctgggagatgacgacggtatggccgtagcccggcgtgtggtggacgaagcgtgggggagatatgtgttggtgctgccagttaaagaacgccgtccagtggttttgcgagaaccactgggcgcgctggatgcgctgatctggcgcaaaggcgatgtctggtgcgtgggggcagacgtacccccgggtcttgaaccaaaagatctgggtgtggaagagactagactgacgcacctgatcgcggaaccggatctggcatctgcgagcctgcccttaaccggcgtcgcggcagtgatgccaggtactgcggtcgatgaaaccggccaggtgcaccgtctgtggacccccgcgcgttttgctcgctcccctcgcactgacgcgtggactgcagccgaacgtattccgctggttacccgtgcgtgcatcgcggcgctgtctgcgaatcgaagtggtattctgtgcgagatttcgggcggcctggatagcgctattgttgcgacctctctgaaagcggaaggtgcgaagattagtagcgggatcaacttccattggccccaggctgaagcagatgagcgcccgtacgcacgcgctgttgcgaaaagcgtgcgaacccggttacaggtggtagcgagtcgtgtagcgcccgttgacccggaaacgtttgatgagatcgtggtcgcgcgaccaagttttaatgccattgatccagtctatgataccgtactggcccaacgtctgattcagggcggtgaaggagccctgtttaccggacaaggtggtgacgcagttttctatcagatgccagcaccacaactttcgttggatttgttggctcgtggcccccgccgccgcggtcttatgggattatcacgccgcaccaaccgcagtgtctggtcgttgctgcgcatgggcttacgtgcacccgtacgagcaacctttccctacggtgcgagaggtgccgatcgtcctccgatgcacccgtggctggaggacgcgcgtggtgttggggccgcgaaacggattcagatcgaagcgctggttgctaaccaggccgtgtttgaagcatctcgtcgcggtgcggcggctcatttggtgcacccactgctgtcgcaaccgcttgtggagctgtgcctttcaaccccagcggccgtgctggcgggtgccgaacaagatagagcattcgtgcgtagcgcttttcgtgcgcaactgccacgcctggtcttagatcgtcaaagcaaaggagatctgagcgttttctttgctaaaggtgtggcgcggagcttgccgggcttgcgtccgcgtctgctcgaaggacgcttagcggcacgtggcctgatcgacgtggaagcgttatcacaagcgatgcagccagaagcgatgatttggcgtgacggttcggccgaaatcctgtgccttgctgttctggaatcatggctccgctcttgggaggctcgtggtgca

SEQ ID NO: 477 - DNA, 657 bp, Artificial Sequence
  Synthetic
atgcgcgttgcagtgccggatcatttagcgtattgcgtaaaacaaggtggagttacgtttctggacgtccgcggggatcgttacttcggcctgccgccggtgctggaacacgcgttcgttgccattgccgaggcggattttctgctgaaagaaccaaattcacttctggagccactcgaagcactgggtgtcttagtgcgaggccaagcccgccgtgccgatctgacaattccgtctgcaaatctgtcatgggtggatgaggtcagcccgaccccaccacgtcttgaccctgcgtcactcgtcgcaaccgtcacgtctgttattcgaacgcgtctgagccaaaagagtaagtccttgcaggctctcttggaagaggtccgtacccgccgtccgggatcgccggcccataattggcagctgatgcgtcgtctgacggctggattccgtgcatcgcgtgcttgggcgccgatagaacccatctgcctcctggacagcttggcgttactggattttctgcatcgccgtggcctgtatccgcatattgttttcggtgtgatccgccaaccgtttgccgctcattgttgggtgcaagctgatgatgtagtcctgaatgaccggctggatcatgtcggtgaatatacaccgatcctggtggtc

SEQ ID NO: 478 - DNA, 1737 bp, Artificial Sequence
  Synthetic
atggaagattacgtggtcctcatttggccggcactcgctgaagctcctgcacgcgacttgattcgtcgcctgccgaaactcaaaaccgtcattgaaactagcggattggtggtactgcgccccgaaaatggtgcgggtctgcgggtaggcgggaacggtgtggtcctgggtagcgtctttcgcaccggcggtgatcgcgaaactgttgcggaattttcggaatcggaagcatccgcgatcgccacgagtcgtggtcagcagttagtgacagagttctggggtggctacctggctgttcttggagatgcttcgcgttccgaagtgatggtcctgcgagatccttcaggtgcaatgccggcttattgtttagttcatggcgaagtccagatcatctgctctcgcttggaggtcctggaggacgcaggactggggcagcaggcgctgaactgggacgtggtggcgcaattactggccttcccaaaccttcgaggtcgctcaacgggtcttaaaggcgtggaagaattacttcccggttgccgtctgacatttacgggaggactgaaaaccgaaacgctgacctggaacccgtggctttttgcccgcccatctgcgcaagcgcctgaacgtggagttgcggcgaccgccgtgcgtcaggcggtggaagtaagcgttcgaaaatgggctgatcagagttcaccggtacttttggaattgtcaggcgggctggatagtagtatcatcgcctgctgtctggacgaaccgcgcaccgcggccaccttcgtgaactttgtcacaccgacggccgaaggcgatgaacgaggatatgcacgtctggttgccaaggcagcagataaacaactgatcgagcaggacatccgggctgacgaagtagatgttacccgtccaagacctggccgccatcctcgtccggccagtcaggcgctgttacagccgctggaacaggcttgcgctgaactggcacctcagttgggtgcgagaagtttcttctccggtctgggaggagacaacgtgttttgtagcattgcaaccgcaagcccggctgcggatgcacttttgactagcggtctgggccgacagttctgggccgcaatcggggacctgtgtgcacgtcataactgcaccgtatgggcagccttaagcgccacgctgaagaaactgctccgctcagatcgtcgtctggtgatcaaaccaaacctggattttctgtcctttcgggaggacgccatagaccgtccggatcacccatggcttgaagtggccgccgatcgtctgccggggaaacgcgaacatgtcgcaagcattctgttggcgcaaggcttcctggatcgttatgagcacgctcaggttgctgccgtccgctttcccttgttaacgcaaccggttatggaggcttgtctgcgcgtgccgacctggatggcaaaccaccagggtcgcaatcgggcggtcgcacgcgatgccttctttgatcgcttgcccccgagagtacgtgatcggcagacaaaaggaggtttgaacgcgtttatgggtgttgcgttcgaacgcaaccgtcaggccttagctcgtcatctgttagacgggcgcctggtacagcgtggcctgatagatgcagtggcaataaaatcggcgctggcctcaccagtcctggaaggaggagccatgaaccgcttactgtacctggccgatgtcgaatcctgggtacgctcatgggaagatgtg

SEQ ID NO: 479 - DNA, 897 bp, Artificial Sequence
  Synthetic
atgaaggaaatcgtgaaacagaatatcagtaacaaagacctgtcgcaactcctgtgttccttcattgattcaaaggaaactttcagttttgccgagagcgctatactgcattatgtagtattcggcggtgagaacctggacgtagctacctggctgggcgccggaattgaaattctgatcctgagcagcgatatcatggacgacctggaggacgaggataaccatcatgcgttgtggatgaaaattaaccgcagcgagagcttgaatgcggccctgtccttatacaccgtcggcttaacgagcatctattccctgaacacaaatccgttgatatttaagtatgtgctgcgctacgtcaatgaggccatgcagggtcagcatgatgatataaccaataaaagcaaaaccgaagatgaatcgcttgaagtgattcgccttaaatgcggcagcctgatcgccctggcaaatgtcgcgggcgtgctgttagccacgggcgagtacaatgaaacagttgaacgttactcttattacaaaggcatcgtggcgcaaatttccggcgactatcacgtgctgctgtcaggaaaccggagcgatatcgagaaaaacaaacagacactgatttacctgtatctgaaacgcctgtttaacaacgcgagcgaggaattgctgtatctgttctcccataaagatttgtactataaagccctgctcgaccgtgaaaagtttgaagaaaaactgatccaggccggggtgacgcagtacatcagcgttctgctcgaaatatataagcagaagtgcttctccaccatagaacagctgaacttagataaagaaaagaaagagctgatcaaggagagcctgctgtcatataagaaaggcgacacccgttgcaagacc

SEQ ID NO: 480 - DNA, 3009 bp, Artificial Sequence
  Synthetic
atgaatgatatcaacaaaaacaaaactaaaaccattaacgaaaagattaaaattttcaccaaagaagaggtgattgatatcagttactttgaagaatggcgcagcgttcgtactctgcttaacgaaaactactttaaaattatgctcgaggaaatgaatatttccaaaaaccaattttcgtatgcgctgcaaccgttaaacgacgagttcaaactgcatactaacgttaaaaatgaagaatggatcaaatgctttaatcgcgtcattaacaattttaactataaaaatattaactataaagttggtttgtacctgcctattcagcctttctccgtttatttacaggagaaactgaaagagatcctgaagaagctgaacaacattaagattaatgataaaattatcgacgcctttatcgaagctcacctgatcgaaatgttcgacctcgtcggtaaagtaatcgcccttaaatttgaagattataaacagatcaacttcctgaaaaacacaaataatggcacccgcttggaggaattcttgcgtagcaccttttattctcggaagtcatttctgaaactgtttaacgagtttccggtactcgcgcgggtttgcaccgtacgtacgatctatttgatcaataactttagtgctatcatccagaacatcaatagcgactacctggaaatccaggaatttctgaacgtcgatttcctgaacttgacaaacatcactctttcgacgggtgattcccacgaacagggtaaaagtgtgtccatcctctattttgatgaaaaaaagctgatttataaaccgaaaaatctgaagatttcagaaattttcgagagcttcatcgactggtacaccaacgtctctaaccataagctgctcgacctgaaaatcccgaaaggaatttttaaagacgattacacttataacgaatttattgagccaaactactgcgagaataagcgcgaaattgaaaattactataaccgttatgggtacctgatcgcaatctgttatctgttcaacctgaatgacctgcatgtagaaaatgtgatcgcccatggcgagtacccggttattgttgatattgaaacgagctttcaagtccctgtgcaaatggaggacgatactttatatgtgaagctgttgcgcgagctggaattggaaagcgtttcatcgtcgtttctgttacctaccaatctgtcgtttggtatggacgataaagtggacctgtccgcgctgagcggaaccatggtcgagctgaatcagcaaattctggcgcctgtcaacattaatatggacaactttcattacgagaaatcaccgagctattttccaggcggaaacaatatccctaaaaacaacaaatcagtgactgttgattataaaaaatacttgctcaatattgtgactggtttcgacgaatttatgaagtatacccaagaaaatcagctggaatttattgagttcctgaaaaaattctcagataaaaaaatccgggtgctggtgaagggtacggaaaaatatgcgtccatgattcgctacagcaaccatccgaactacaacaaagaaatgaaatatcgcgagcgtctcatgatgaacttgtgggcgtacccttacaaagacaagcgtattgttaatagcgaagtacaggacctgttatttaacgatatcccgatcttttactcctttccaaatagccgtgacctcattgatagtcgcggcttggtgtataaagattaccttcctgtgacaggactgcagaaagcaattgatcgcgtgaaagatacctcggtaaaaagcttgttcgaccagaagctgattcttcagagtagcttaggtctgtgggatgagattctcaacaagccggtccagaaaaaggaactgctctttgaaaagcagaactttaactatgtgaaagaggcgatcaatattgcggaattgctgattggctatttaatcgaaacggacgaccagagcaccatgctgagcattgattgttctgaagataaacactggaagattgttcctttagacgaatccctgtatggtgggctgtccggcattgcattattttttctcgatatttataaaattaccaaagatgaaaaatattttaattactatgataaaatcatttccacggccattaaacaatgtaaagcgaccatcttctcgtcaagcttcacgggttggctgagtcccatttatccgttgattctggaaaagaaatactttggtaccatgaaagataagaaattctttgactacacgatggaaaagctgtcgaatatgactgaagaacaaattaacaacatggatggtatggactatatcagtggcaaggcgggtattgtcaaactgctgattagcgcgtaccgggaatcgaagaacaatgaaaacatcggactggccctgagtaaattcagcaacgatctgattcaaaatattggcaccggcaaagtcagtgaattacaaaacgtgggcctggcgcacggcatttctggtattatggtcgtagtagcctcactggacacgtttaaaagtgaatatattcgcgagcagctggcaattgaatatgagatgttctgtttgcgtgaagattcatacaaatggtgttggggcatctctggaatgattcaagcccgtctcgaaattctgaaactgagcccggagtgtgtggataaaaaagagctgaacttgcttattaagcgttttaaaaacatcttgaatcagatgattaacgaagattccctttgtcacggcaacggttcgatcattactacgatgaagatgatctatatgtacacccaagacaccgagtggaactctctgattaatctgtggttatcaaatgtaagtatctattcgaccttacaaggctatagcattccaaagctgggcgatgtaacaattaaggggttgtttgatggcatttgtggtattggctggttatacctgtattcgaactttagcattgaaaacgtgctgctcctcgaggtc

SEQ ID NO: 481 - DNA, 648 bp, Artificial Sequence
  Synthetic
atggacctgtggttgagcgccggggtctatgctgtcatgatcgatgatgatgtagttttcctggacgtcgccaccaatgcatacttctgcctcccagccgttgggagcgtgttggcactcgaaggtcgttcgctgcgtgtggcggctcgcgaactggcagaagatcttattcaggcaggcttagcatccgcggctgcggcaatcgaacccccaccgagcacaccagccccagttcgcactgcgcgtgcggtattggaagctctgccggcgcgtgaaagaccacgtccacgtcttgcccactggcgtcaggcgattatggctggcttggcgtcccgtgccgctgaacgtcgaccattcgcgcagagactgccgccgccttcaacgggggtttcacctccggcatcagaaggcctgcttgccgatctggatgcgttccgtcgacttcagccatggttgccgttcgacggtgcttgtctgttccgtagccaaatgctgcgcgattatctccttgcgctgggtcaccgcgttgactggattttcggtgtacgtacgtggccgtttggtgcccactgttggttgcaggccggcgacctggtgctggatgatgaggccgaacgtctgattgcgtatcaccccattatggtacgt

SEQ ID NO: 482 - DNA, 1851 bp, Artificial Sequence
  Synthetic
atggggtatgccgcattgacttatccgggtggtttagcggcagcagcgtttgatgagatggtagaagcactgatcgatgctggatggaccttggcgttgcgtgcgttcagactcgccgttctcaccgatggtcaggctccagccgtgtcgccgctgatgggcagaggcggcgtagcaggcgttctcatcggcgaagcgtttgatcgtcgcgccacattaggtggcgcggtcgcacgtgccgcgctggatggtttggctgacatcgatccgctggaagcaggtcgccatctgattgaaaccgcgtggggcggctacgtgggtatgtggattggtcgggccgaagctggtccgacactgctgcgcgatcctagtggcgcgctcgaagccttagcgtggcgccgtgacggtgtaaccgttatgtcagcgcgcccgttgacggggcgcgcaggcccagctgatttagcaatcgattggccacgtatcgtgcagattctggccgatcccatttccgcggctctcggcccgccccctctgactggcttagcgaccatagacccgggcgcggcggttcatggcgcggatggccaagaacgctcagtgctgtggaccccagctgcagttgtccgtggtgctcgtcaccgtccttggccaagccgtcaggatctgcgtcgcaccatcgatgcgactgtcgcggcactggcctcggatgcgggcccgattgtctgcgaaatttcaggaggtctggactcggccatagttgcgactagccttgcggcgtccggtctgggtccgcagctgacagtgaatttttacggtgaccagcctgaagctgatgaacgcggatacgctcaagccgtcgccgaacgtatcggtgcgcctctgcggacccttcgtcgagagccgttcgcgttcgatgaaaccgtgctggcagccgctggacaggccgcacgtccgaattttaacgccctcgatcctggatacgatgccgggctcgtgggtgccctggaagctatcgatgctcgtgcattatttacgggccatggcggtgataccgtgttttatcaagtggcggccagtgccttggccgcagacttactgggcggcgcaccatgtgaaggtagccgccgtgcacgtttagaggaagtagctcggcggacccgacgctcgatttggagtcttgcatgggaagcgttttctggtcgacccagcactgtaagcattgaaggtcagttgcttcgacaggaagcagagagaattcggcgcgtcggcctgacccatccgtgggttggaggcctgtcgtctgtgacccctgcgaaacgccagcaaatccgcgcgctggtcagtaacctgaacgcgcatggcgccactggtcgcgccgaacgcgctagaatcgtgcacccgcttttagctcagccggtggttgaagcctgcctggcgattcctgcccctatcctcagtgcgggcgaaggagaacgctcatttgcgagagaagcctttgcagaccgtttgccaccgagcattgtgggccgccgaagcaaaggggaaattagtgtgtttcttaacagatctttagcagccagcgccccctttctgcgtggctttttacttgaaggacggctggcggctcgcgggctgattgatcgtgacgaacttgcagccgcgctggaaccggaagcaatcgtctggaaggatgcgtcacgcgacctgcttactgcggcggccctggaggcgtgggtcagacattgggaagcacgtattggcgagggggaagcagcggaaggtgagcgtgctgccggtcgtggtaccgcagcgacgggaccgcgtacaagcgcgcggaaggcgaacacccgt

SEQ ID NO: 483 - DNA, 543 bp, Artificial Sequence
  Synthetic
atgcacggtaaactgctgatctgcgcaactgcttcgatcaacgtcatcaatatcaaccattatattgtggagctgaaacagcacttcgatgaggtgaatatcctgttttcaccttcctcgaagaactttatcaacaccgatgtcctgaagctgttttgcgataatctgtatgacgagatcaaagatccgctgctgaaccacatcaacatagtggagaaccacgagtatatcttggtgctgcctgccagtgccaatacgatcaacaaaatcgcgaacggtatatgcgataacctcttgacgaccgtatgcttaaccgggtaccagaaactgtttatctttccgaatatgaacatccgcatgtggggaaatccgttcttacagaaaaatattgacctgcttaaaagcaacgacgtgaaggtgtattcccccgacatgaacaaatcttttgagataagctcaggccgctacaaaaataacatcacgatgccgaatatcgaaaacgtgctgaattttgtcctgaacaatgagaaacgcccgctggat

SEQ ID NO: 484 - DNA, 3171 bp, Artificial Sequence
  Synthetic
atgcgcgaactccaaaatgcgctttactttagcgaagtggtttttggaccgaatcttgagaagattgtaggagaaaagcgcctcaatttttggctcaaacttataggtgaggacccggaaaacctgaaggagtttctctcgagaaagggcaattctttcgaagaacaaaccttaccggaaaaggaagctatcgttccgaaccgcttaggtgaagaggcgctggaaaaagtccgcgaagaacttgagttcctcaatacttacagcactaaacatgtgcgtcgcgttaaagagttgggagtgcagatccctttcgaagggattctgctgccattcattagcatgtatatcgaaaaatttcagcagcagcaacttcgcaaaaagatagggccgattcacgaagagatctggacgcagattgttcaagatatcacctccaaattaaatgcgattctgcaccgtaccctgatcctggaactgaatgtagctcgtgttacctcccaacttaaaggtgatactccggaagaaagattcgcctactactcgaaaacctatttaggcaaacgtgaagtaactcaccgtctgtatagcgaatatccggtggttctgcggttgctgttcaccaccatttcacaccacatttcgttcattacggaaatccttgaacgcgttgcaaatgaccgtgaagccattgaaaccgaattttcaccgtgttccccgattggtaccctcgcctctctccacttaaactcgggagatgctcaccataaacagcgtactgtgacgattttggaattctcctcctcgctgaaacttgtctacaaacctcgctccctcaaagttgatggggtgttcaacggtttactcgctttcctgaacgatagaacgggggaagtcattaaggaccagtattgccctaaggtgttacagcgcgatggctacggctatgtggaatttgtcactcaccagtcttgtcaatcccttgaggaagtgtcagacttctacgagagactcggctctctgatgagtctgtcctacgtactgaatagttctgactttcatttcgagaacattatagctcatggtccctatcctgtcctgatcgatcttgaaaccatcattcataatacagcggatagcagcgaggaaacgtctaccgctatggatcgcgcgttccgtatgttgaacgattcggtgctgtccactggtatgcttccctcctctatttattatcgcgatcagccgaatatgaagggtctgaacgtcggaggtgtgagcaaatcagaaggtcagaaaacaccgttcaaagttaatcaaatcgccaatcgcaacaccgatgagatgcgtatcgaaaaagatcacgttaccctgagcagccagaaaaatctgcccatttttcagtctgccgcaatggagagcgtacatttcttagatcagatccagaaaggctttacctccatgtatcagtggatcgagaagaacaaacaagaatttaaagaacaggtgcgtaagtttgaaggtgtgccggttcgtgctgttcttcggagcacgactcgctataccgaactgctgaaatcttcctaccaccctgacctgctccgcagcgcgttggaccgtgaagtactgctgaaccgtttgactgttgactcggtaatgaccccgtatctcaaagagattattccactcgaggtggaagatctgctgaacggtgacgtgccatacttctacaccctgccggaagaacgcgccctgtatcaggaagcgtctgcgatcaatagtacgttctttaccacttcgattttccataagattgaccagaaaatcgataagctgggtatcgaggaccatacccagcaaatgaagatcttacacatgagtatgcttgcctctaacgctaaccattacgccgatgttgccgacttggatattcagaaaggacacaccattaaaaacgaacagtacgttgagatggccaaagacatcggtgattacctgatggagttatcggtcgagggtgaaaatcaaggggaaccagatctgtgttggatttcgaccgtcctggaagggagctctgaaatcatttgggacatcagcccagtgggcgaagatttatacaacggcagcgctggcgtcgctctcttttatgcgtacctgttcaaaattacaggtgaaaagcgttaccaagagatcgcatacaaagccctggttccggttcgccgcagtgtggcccaattccagcaccatccgaattggagcattggtgcgtttaacggagcgtcaggctatctgtacgcgatgggtacgatagcggccctgtttaatgatgaacgtttgaagcatgaagtaacccgcagcattccgcacattgaaccgatgatccacgaggataagatctatgatttcattggcggttccgcaggggcgctgaaggtgttcctgagcctgtcggggctgtttgacgagccgaagtttttggaacttgccattgcatgcagcgaacatctgatgaaaaacgccattaaaacggatcaaggtatcggctggaaaccaccgtgggaggtcaccccactgaccggtttcagccatggggttagcggcgtcatggcatccttcatcgaactgtaccagcaaaccggtgatgagcgcttgctcagttacattgatcagagtttagcctatgaacgttccttcttcagcgaacaagaggagaactggctgactccgaacaaagaaacacccgtggtagcttggtgccacggcgcgccgggaattttggtatcacgactgcttctgaagaaatgcggctatttggatgaaaaagtcgaaaaagaaattgaggtggcattatccacaactatccgtaaaggccttggtaacaatcgcagtctttgccatggtgatttcggccagctggaaattcttcgctttgcggcggaagtgttaggcgatagctatctccaggaagttgtcaacaatctgtccggcgagttgtataatcttttcaaaacggagggatatcagagcggaaccagccgcggtactgaatccgtgggcctgatggtaggtctgtccgggtttgggtatggtttactttcagcggcatatccatctgctgtcccctcaatcttaacattggatggtgagatccagaagtaccgggagcctcatgaagcc

SEQ ID NO: 485 - DNA, 2970 bp, Artificial Sequence
  Synthetic
atgaaaacgccgctgacctcggaacatccttcagtgccgacgacgctgccgcatactaacgacaccgattggctcgagcaattacatgacattttgtccattcctgttacggaagaaatccagaaatatttccacgccgaaaatgatctgttctcgtttttctatacaccgttcctgcagtttacgtaccagagcatgtcggactactttatgaccttcaagaccgatatggccctgatcgaaagacagagcctcctgcaaagcacgctgaccgcggtacatcaccgactcttccacttaacgcatcgcacccttattagtgaaatgcatattgataaacttaccgttggcctgaatggctctacgccgcacgagcgctacatggatttcaaccacaaattcaacaaaacctcgaagtcgaagaacctgtttaacatctacccaattttgggaaaattggtcgttaacgaaactctgcgcactattaacttcgtcaagaaaatcattcagcactacatgaaggactacctgctcctgtcggacttcttcaaagagaaggacttgcgtcttaccaacctgcaattaggcgtgggggatacacacgttaatgggcaatgcgtcaccattctgacgtttgcatcaggccaaaaagtggtatacaaacctagatcattgtcgatagataaacagttcggagaattcatcgagtgggtaaactcgaaaggttttcagccttccttgcgtatccctattgcgattgatcgtcaaacctatggttggtatgaattcatccctcatcaagaggccaccagcgaagatgaaatagaacgctactattctcgcatcggtggttatctggcgatcgcctacttgttcggggcaaccgacctgcacctggataacctgatcgcctgcggcgaacatccgatgcttattgatttggaaacactctttaccaacgatctcgactgctatgacagtgcgtttccgttcccggcgctggcccgcgaattaacccaatccgtttttggcacccttatgcttcccatcaccatcgcgtcggggaaactgctggatatagacctgtcagcagtaggaggcggtaaaggtgtgcagtccgaaaagatcaaaacctgggtcatcgtgaatcagaaaactgatgagatgaagctggtcgagcagccgtatgttaccgagagttcccagaataaaccaacagttaatgggaaagaggcgaacattggcaattatattcctcatgtcacagatggctttcgtaaaatgtaccgcctgtttctgaatgaaattgatgagttaatggatcataacgggccaatctttgcgtttgagagttgtcagattcgtcatgtttttcgagctacccacgtgtatgcgaaatttttggaggcaagtacccacccagattacttgcaagaacctaccagacgtaataaactgttcgagtccttttggaacatcacgtcgctgatggcaccgttcaagaaaattgtaccgcacgaaatcgcggagttggagaaccatgatattccgtacttcgtcctgacttgtggcggcaccattgttaaagatggatacggccgggatatcgcagacctgtttcaaagtagctgcatcgaacgtgtaactcatcgtctgcagcagctgggaagcgaggatgaggcgcgtcaaattcgctacattaaaagcagcctggcgacgttgaccaacggtgattggaccccatcccatgagaaaaccccgatgtctccggcctcggccgaccgtgaagatggttacttcctgcgcgaggctcaggccatcggcgacgacattttggcgcagctgatttgggaggatgaccgtcacgccgcttaccttattggcgtaagcgtgggcatgaacgaagccgtcactgtgtcacccctgacgcctggcatctacgacggcacacttggcatagtgctgttcttcgatcagctggcccagcagaccggcgaaacccattatcgccacgccgccgacgctttactggaaggaatgttcaaacagctgaaacctgaactgatgccgtctagcgcttacttcggactgggtagcctgttctatggcctgatggtgttgggcctccagcgttccgactcgcatatcattcagaaagcgtatgagtatctgaaacatttggaagagtgtgtgcagcatgaggaaacgccagattttgtctcgggtttgtctggtgtactgtatatgctcacgaaaatttatcagctcacgaatgaaccgagagttttcgaagtggccaaaaccacagcttcgcgtctgtctgtgctgcttgacagcaagcagcccgacactgtgctcaccgggttatcccatggcgccgcaggattcgcccttgcattactgacctacggaaccgctgcaaatgatgaacagttgctgaaacagggccactcctatctggtgtacgaacgtaatcggtttaacaaacaggaaaacaactgggttgatttacgtaaaggcaacgcgtatcaaacattttggtgccatggcgccccgggtattggcatctcacgcctcctgttagcgcaattttacgatgacgaactgctgcatgaagagttaaacgcagcactgaacaagactatttcggacggcttcggccacaatcactcactgtgtcatggcgatttcggcaacctcgatctgttattgctttatgcccaatatacgaataacccagaaccaaaggaactcgctcgcaaactggccataagcagtatcgatcaagcgcacacgtatggctggaaactcgggctcaatcatagcgatcaactgcagggtatgatgttaggggtgactggtatcggctatcagctccttcgtcatataaatccgacagtccccagcattttggcactggaactgcccagctccacgttaactgaaaaagagctgagaatccatgatcgt

SEQ ID NO: 486 - DNA, 870 bp, Artificial Sequence
  Synthetic
atgatcaattatgctaatgcgcagctccataagagtaaaaacttgatgtatatgaaagcccacgaaaacatcttcgaaatcgaggcgctgtacccgctggaattgttcgagcgttttatgcagtcccaaaccgattgctccatcgattgtgcctgtaaaattgatggtgacgaattgtatcccgcccgttttagtctggccctgtataacaaccagtatgccgaaaagcaaattcgcgaaaccatcgacttcttccatcaggtagagggtcggaccgaggtgaaactgaactatcagcaactgcagcacttcctgggtgctgacttcgattttagcaaagtgattcgaaacctggtgggtgtggatgcacgccgcgaactggctgattcccgggttaaactgtatatttggatgaacgattacccagagaaaatggcgaccgccatggcatggtgcgatgataagaaggaattgtcgacgttgatagtaaatcaggagtttctggtcgggttcgatttttatttcgatggtcgcacggcaatagaattatacattagtctgtcatccgaagaatttcagcagacacaagtttgggaacgcctcgcaaaggtagtgtgcgccccagcgctgcgccttgttaatgattgccaggcgatccagattggcgtgagccgtgccaatgatagtaagatcatgtattaccatacccttaatccgaactcgtttatcgacaatctgggcaatgaaatggcaagcagagttcacgcgtattaccgacatcaaccggttcgctctctggtagtatgcataccagaacaggagttgaccgcccggtccatacagcgcttaaacatgtattactgtatgaac

SEQ ID NO: 487 - DNA, 1800 bp, Artificial Sequence
  Synthetic
atgaaaggcgaggaaatgttgggacatccacagaccggttttgttgtactgccagacaacgatgccaccggcgacgtgacgggccgcctgttaccttggggtgatgtagttacagtgtatccgtctggccgtccatggatcatcggcaactgctgggatcgcccagtcctcgtccatgatggcgtgatcgtcttgggtcataccagcgtcacgcgtgatcaaattgcccgtcatgggaacgatccgcatcgcttactggacgaggccgacggcgcatttcatgcggcggtcctgatcggacacgaagttcatgttcgcggctccgcctacggtgtctgtcgtctgtatacatgcgttgttgacggtgtgaccttagtgagtgatcgtacagacgtcctgcagcgtctggcaggtactgatgtggacgtcgacgtgctggctggccacttgttagagccgatcccgcactggttaggcgaacaaccgttattgacgtccgtggagcccgtgccaccgacacatcacgttattttaactccggacgcacgtagtcgtttacggccatcacgtcgtcgtcggcctgaaccgtcgctgggtttgcgggacggtgcggaacttgtccgggagcgtctggccgcagctgtggctacccgtgtggacagtccagcgttaattaccagtgaactgagtggcggctatgattccactagtgtgtcatacttggcagcgcgcggtaaagccgaggtggtgctggtcacggccgcgggacgtgacagcacaagcgaggatctgtggtgggctgaacgcgcagccgcagggctcccggaactcgatcacgtagtgttacctgcggatgaattaccgtttacgtacgccggcctgacggagcctggtgcacttttggatgaaccgtgtacggctgttgccggccgtgagcgtgtactggcgctggtacgtaaagccgcggcccgcggctctacacttcatctgactggccatggtggcgatcacctgtttacttcactgccgacaccgtttcatgacctgtttcgtacgcgtccagtcgccgcgctccgccagttgcgtgcatttggcgcgttggctgcgtggccgacccgtaagctgatgcgcgaactcgcggaccgccgcgatcatagcacctggtggcgcgcgcacgcacgtcctcagaatggccagccggatccgcacagccccatgttaggctgggcaattcccccgactgtcccggcgtgggttactgctgacggcgtgcgcgcgatcgaacttgggattttagaaatggcagaacgcgcggagccccttggtcatgcgcgcggagaacacgctgagctggattcaatctttgaaggggcgcgtatggcccgtggcctcaatcgtatggctacgcatgccggagtcccgcttgcagccccgttccatgacgatcgggtcgtggaagcgtgtctgtcgatccggccggaggaacgcatttctgcatggcagtacaaacccttactgaacgccgcaatgcagggtgtggtgccgagcaccgttcttgatcgtagcgctaaagatgacgggagtattgatgtggcctatgggctgcaggaacaccgtgatgaactggtagcgctgtgggaatcatcacgtctggcggaaaccggtctgattgatgcgggtatgctgcggcgtttatgcgcgcagccgtcctcccacgagctcgagcatggatccttgtacgctactatcgcttgtgagttgtggctgcgtggtttagatcaggatcgtacccaacgctac

SEQ ID NO: 488 - DNA, 252 bp, Artificial Sequence
  Synthetic
atgccggtgcagctgcgtcggcatgtgtcttttacggctacggaatacggcggcgtgctgctggatgaaaccaaaggcgcatactggcgtctgaacaccacaggcgccgaagttgttcgcgccatgggggaagccgagcgggatgagattgtacggcatgtggtggcgaccttcgatgttgatgcgcaaaccgcagcccaggatgtcgatgtcctgctggcagaacttcgtgatgccggccttgtggcctcg

SEQ ID NO: 489 - DNA, 441 bp, Artificial Sequence
  Synthetic
atgtctgtgaatatggctctccgtggccatggtatgtccggtcgccgtcgtcgcttagatgccacgcgtgctcgcctggccgttgtggttgcccgtgtcctgaatctcttaccgccgcgcttaatccgtcgttgtttgcgtgtactgagtcgcggagcccgccctgcctcgattgaggcagcagaagctgctcgtcgtactgtggttgcggtgagtccagctgccgccggtgcgtacggctgtttaatccgcagcattgccaccaccctggttcttcgttcacgcgggcaatggccaacctggtgtgttggtgtacgtgcggagcctccttttggtgcccatgcctggattgaagcagaggagcggctggtggatgaacctggtactatgcatacttaccgtcgtcttatcaccgttggtccactgtctcgcaaagttcgt

SEQ ID NO: 490 - DNA, 1035 bp, Artificial Sequence
  Synthetic
atgtctatcgaactgacgcctagtttggccgatctggtcgatccacttccaggtcacgcactgcgcgctgcggcgacattacgtctggcagatctgattgcggctggtgcagatactgcaccggcattagcagcggcggcacgcattgatgctgacgcgatcgcgcgtcttatgcggtatctgtgcagtcgcgggatttttcaagcacatgaaggccggtacgcgttgactgaatttagcgaattgctgctggatgaagatccatctggcctgcgtaaaaccttagatcaggatagctatggggatcgtttcgaccgcgcggttgcggaactggtggacgttgtacggtccggtgaaccttcttatcctcgcctttacggctcgacggtttatgatgacctggcagccgatcctgccctcggcgaggtgttcgcggatgttcgtggcttgcactccgcagggtatggggaagatgtcgcggcagtggcgggttggtcctcatgcctgcgcgttgtcgatctgggtggagggactggctccgtcctgcttgctgtgttagagcgtcacccgtccctgtcaggcgcagtactggatctgccatacgtcgccccgcaggcaaagaaagctctgcaggcctcagcgtttgcccaacgttgtgaatttatcaaagggagcttcttcgatccgttacctccggcagaccgttacctgttgtgtaacgtgctgttcaactgggatgacgcgcaagcaggcgctattttggcacgctgtgcgcaggcgggccctgtggccggagtagtggtagccgaacgtttgatcgatccggatgcggaagtggaactcgtagcagctcaagatctgcgtctgttggctgtttgcggcggtcggcagcgtggcaccgctgaattcgaagcgcttggggcagcccatggcctggcgttaaccagcgttaccctcacggcatctggtatgagcctgctccgtttcgatgtgtgtcgtgccgggagtgctggcggggaagttgtggaaaaatct

SEQ ID NO: 491 - DNA, 1398 bp, Artificial Sequence
  Synthetic
atggacggaaccaacaagcgcctggaggacaagtggtttgatattaacttcctggaaatgtatacacgcagctgcctgaaaacttttggctacttcgacgaaattctgatcgtgaagaaacgcatcgaggtcctgaagaacgtgcttgaaaaacagtacttgtctaccaatgattatgctgaggagtttttcgagctgaataccaccttggagagcataaaagaatacatcaaactgaatctggtcatcgagaaagaaccgatctcaatttgcattatggtcaaaaacgaagaacgttgcatcaagcgctgcattgatagcgttgaaatcctcgccgaggagataatcattatcgataccggctctacggataataccattaacattattgaggaatgcgcaaacgacaaaattaaagtgttctcaaaagaatggcgtaacgatttttccgaaattcggaactatgccatcgagaaagcgagtagcgaatggctggtgtttatagatgccgatgaatatctggacgaagcctcggtgctcaacctgctcagtacgctcaacatctttaacaatcataagctcaaagactctattgtcctgtgccccatgatcaacgaagccaataacaccatccatttccgtaccgggaaatttttcagaaaagactccgggattaaattctttggtacctgccatgaggagccccgcattaaaggcatgccgaattctaccctgctgattccgatcaaggttgattatctgcatgacggctacctggcaaaagtacaatcaaataaagacaagaaaacccgtaacatcgaactgttagaaggtatggtggaactggaaccggataatcctcgttgggcgtatatgtttgtgcgcgacggatttgcaatcctcgataacgaatacattgagaaaacttgtttgcggtttttactgctggacaaaaacgtacgcatctgcgtcaacaacctgcaagaccataaattcactttgtcactcctgacgatcctgggccgcctctatctgcgcgagtgcgaattcgagaaaagcaatctgataattcgcattcttgacgaactcatccctaatagtctggatggtaaatttctggcattcatggagcgattcagcaaactgaaaattgagattaatacgctgttaacggaggtcatcgaatatcgtcgtaaccacgaagtagatgaaaccagtttaatcaacacacaaggctaccatatcgactatgttctgtcgattttgctgttcgaaacgggtaattacgcgcaaagtaagaaatacttcgatttcctgcaggagaaccattttctggaagaactgtttcaagacagctcttattctatcatactgaaaatgctcgagtcagtagaagat

SEQ ID NO: 492 - DNA, 2940 bp, Artificial Sequence
  Synthetic
atgaagtttaacaagaacgtgttcccagagatcaatgaaacggatttcgataacaatatcaagcccctgctggatgaactggaatctcgtattaccattccgcaggaggaactgagcttttcaagcattaacgatgatttatttcgcgagttaacccgcaacgaggagtacccttaccagagcatttgtacgatcgttgcaaacatcgtgatggatgacggcagtgagatttggcgcaaagatatttttgttgattccaatagtgtgcgcgaagccgtatgcgacattctgagccaaacgttattcctctatttcatccgctgcttctccgaacaaattaaagacattcgcaaaactgatgaggataaagagtccacctacaaccgctacattaacctcctgttcagctccaacttcaaaatcttctccgacgaataccctgtcctgtggtatcggaccattcgcatcatcaaaaatcgctggtattctatcaagaaatcgttactgctgactcaaaaacaccgtgtggagatcgataagcagttggacatcccgcacaagatgaagattaaaggcctgaaaatcgggggagacacgcataacggcggtgccacagtgaccacgatcttctttgagaaagggtataaactgatttataagccgcggagcacatccggcgaattctcgtacaagaaatttatcgaaaagattaacccgtacctgaagaaagacatgggagcgattaaagcgatcgatttcggtgaatacggcttttctgagtatattgagtgtaacacggatgaagaggacatgaaacaggtcggtcagcttgcatttttcatgtacctgttgaatgcatcagatatgcattatagcaatgtcatttggaccaaacagggccctgtgccgattgatttagaaaccttgttccagccggatcgtattcgcaaaggcctgaagcagtcggaaactaacgcgtaccacaaaatggagaaaagtgtatacggaacgggaattattccaatttccctgagcgttaaaggcaaaaagggtgaggtcgacgtcggctttagtggaatccgtgatgagcgctctagttcgccgtttcgcgttctggaaattttggatgggttttcgagcgacatcaaaatcgtgtggaaaaagcagcagaagtctagctccagcaaaaacaatctgattgtcgatcacaaaaaggagcgcgaaatccttcagcgtgcccagtccgtcgtagaaggtttccaggaaacctctaaaatcttcatgaaacatcgtgaggaattcatctccattatcttagactcattcgagaacatcaaaattcgctacatccataacatgacgtttcgctacgaacagttgctgcgcactctgacggatgccgagccggcccagaagattgagttagaccgtctgctgctgagtcgtaccggaattctgtccatctcgtctagtccctacatctcgctctccgaatgtcaacagatgtggcagggtgacgtgccgtacttctactcgaagttttcgagcaaaagtatctttgataccaatggcttcgttgatgaaatcgagctgacgccccgccaggcatttatcatcaaagccgaaagtatcaccaacgatgaagtcgattttcagtccaagatcattaaactggcgttcatggcacgcttaagtgacccgcacacaaccaacgacaacaaactgaataaaaaggtgattatcgaaagcaaccagcagagcaacagcagtgaatcaggtaacaaagccattttgttcctgagcgatctgctgaaaaataacgtactggaagatcgttatagtcatctgccgaaaacttggattggccctgtagcacgtgatggcggtttgggttgggcgccgggcgtgctgggatacgatctgtactcgggccgtacaggacctgcgttagcattggctgcggccgggcgcgttttgaaagataaagacagtatcgaacttagcgccgacatttttaataaatcgtcccagattctgcaggaaaagacttacgactttcgtaacctgttcgcatcaggtatcggcggttttagcgggattaccggtctgttttgggcgctgaacgcggcagggaatattctgaacaatgatgactggattaaaacctcgaatcagagtatgctgctgctgaatgagaacatgctgaaagtggacaaaaatttctttgacctgattagcggcaactcgggagcgatcggtatgatgtacctgaccaatccaaatttctatttgtctcgctcgaaaattaacgacattctgctgaccacggactgcttgattactgaaatggaaaaagacgaaacgagcggactggcccatggcgtgtctcagatcctgtggttccttagcattatgatgcaacgtcagccctcaagtgaaatcaaaatccgcgcgacgattgtcgacaacatcatcaagaagaagtatacgaattcctatggcgaaatcgaatgctactatccgactgatgggcactccaaatccacctcgtggtgcaacgggacaagtgggattctggtcgcctatattgaggggtataaagctaatatcgtggacaaatcctcggtgtatcatattattaatcagatcaacgtcgaacaacttcagcatgataacattccgatcatgtgccatggtagccttggtgtgtatgaatcgcttaaatatgcgtcaaagtactttgaaatcgaaaccaagtaccttctggatgtgatgcgcaatggcggctgctcctcccaagaagtattaaagtactatggcaagggtaacggccgttacccgctgtcaccaggtttaatggcgggtcagtcgggcgcgttgctgcactgttgcaaactggaggataacgatatcagcgtgagccccatttcactgatgacg

SEQ ID NO: 493 - DNA, 2781 bp, Artificial Sequence
  Synthetic
atggatccgagtatcaaaaagctcgtggattctatcatcgaattctacaaaaaggacatctacctggcatacaaagagctggaacgcgaaatcaaaaacatcgataagaccatctacaacacttcaaatgacgagatcttgcggatttttaaagagagcctgatcagcatcatcaccgatgatatttaccgcctctcgattaaaaccttcatctatgagtttcacaagtttcgtatcgataacgggtttccggctgtcaaagatagcgaaagcgccttcaattattacatcagtacctttgacgtgaaaacgatcgctcgctggtttgagaaattcccaatgctggaatccatcatctccagtagcatcaaaaacgattgcacatttatggtggatgtatgtgtcaatttcatcttagacctgtcggaatgcgagaagattaatctgatctcagaggatagccggctcatcacgatctcatccagcaactctgacccgcacaacggtggcacgcgtgtcttgttctttcgtttccacaacggtgataccattctttacaaaccccgcagcctgaccgtggacaagctgatctctaatattttcgaagaggtattcgaattcgatgcgacgaactcgaaaaatcctattcccaaggtgctggatcggggtacctatggctggcaggaattcattgagaagaaatcgatctcttcctcagagattaagcaggcctactataacctgggtatctttagcagtatctttacagtgttagggtctactgatatccacgatgaaaacttgatttttaaaggtacgaccccgtatttcatcgatctggaaacagccctctctccgcgtatccggtatgaaggtaatgaggaaaacctgttctatcggatgagctcatcgttgttcacttctatcgtggggacgactattattcctgcaaaacttgctgtccattcccaggaaattatgatcggcgcaattaacacccctgcgaaacagaaaaccaagaaggatggctttaacatcatcaacttcggcacggatgccgtcgatatcgcaaaacagaatattgaggtggagcgtattgctaaccctatgcgcattaaaaataacatcgtgaacgatccgctgccgtaccagaacatctttacgcgcggcttcaaagaggggatcaaatccatcatcctgaagaaaggctcgatcatttccattctgaacaacttcaacagcccgattcgttacatcatgcggccgacggcaaaatattatttgattctggatgccgcggtatttcccgaaaacctgtattcggaacagacactgaacaaaaccctgaattacttaaagccgccaaaaatcgtggaaaattccctgatttctaaacagctctttcttgccgaaaaacgcattctgtccgaaggcgatattccgagcttctatgtgctgggcaaagagaaaaatatccgtgcgcagaacttcattagcgaacagatcttcgaggaaaccgcggtcgataacgcgattcaaattctggaatccatttcgcaagactgggtgaattttaatgagcgcctgattgcggagggcttctcctatattcgtgaacagagtcgtggctatctgtccagtgattttgagaactctgatattttcaaaagctcactgaccgaaacaaagaagtccggttataccgcaatgctgaaaacaattatctccatgtcggtcaagacctcggaaaacaaaaagatcggttggctgccaggcatttatgatgattatccgatcagctatatgagtgccgcgttttgttcgttccatgattccggcggtatcatcactttgcttgaacaccactttgggcactgctcccccgaatataacgagatgaagcgcgggctgctggaactgggcaaaatgttgaaaattaacaatagtaacctgagcatcatctccggctcagagtctctggaatttctgtatacgcaccgcgaagtcgaatgcctggaactggaatacattttaaacaattcagcggaaatcatgggcgacgtgttcctggggaaattaggcctttatcttatcctggcgagctacctgaaaacagacctgaaaattttccaagatttcagtatcatctgccagaaaaacctcgagtttaaaaagttcgggatcgcgcacggtgaattagggtatctgtggaccatcttccgtattcaaaacaaactgaagaacaaaaatgcgtgtctgagcatctatcatgaagtgttgaacatttataaaggtaagcgcattgaatccgtgggatggtgcaacggtttatcgggtattctgatgattttgtcagaaatgagcaccgtattagagaaaaatcaagactatctgttcaagctggcaaatctgagcactaaactgaatgaggaatccgttgacctgagtgtgtgccacggcgccagcggggtgcttcaaacactgcttttcgtctatagcaacacgaacgataaacgttatctcagcctggccaataagtattggaagaaagtgctggataacagcattaagtacggtttctacaatggagaacgcgataaggattatctgttgggatatttccagggttggtcaggcttcacggacagcgcactcctgctggataaatacaataacaatgagcaagtgtggattccgatcaacctgagctccgatatctatcagcataatctgaacaactgcaaagagaagaattatgagggcgatggctgccataaatct

SEQ ID NO: 494 - DNA, 2325 bp, Artificial Sequence
  Synthetic
atgcaatctacaccattactgcaaatacaaccacatttccatgtagaggtcattgaaccaaagcaagtctacttgttgggtgaacaagctaatcatgcattgacaggccaattatactgccaaattttgccattgttaaacggacaatacacattggaacaaatcgttgaaaaactagacggagaagtaccacctgaatacattgattatgtgctggagagactagctgagaagggctatctgactgaagcagcacctgaattatctagtgaagtggccgctttctggtctgagctggggattgcacctcctgtcgcggccgaagcattacgtcaacctgtgactttaacacctgttggaaacatcagcgaagtaacagtagcagccttaaccacagccctacgtgatatcggtatttccgttcaaacacctacagaagctggatcgccaactgcattgaacgttgtacttaccgatgattatctccaaccagaactcgctaagatcaataagcaagccttagaaagtcaacaaacttggctacttgtcaaaccagttggctccgtgttatggttgggtccggtattcgtgccaggaaaaacaggttgctgggattgtttggctcacagattaagggggaatagagaggtagaggcctctgtattgagacaaaaacaagctcaacaacaacgtaatggacaaagcgggtctgtaataggatgccttcccacggctagagcgacactgccctcaacactccaaactgggctgcagttcgctgctaccgaaattgctaaatggatagttaagtatcatgttaatgccacagcgcctggcaccgtattcttccctacattggatggtaagataattacgctaaatcactccatactggatttgaagtcacatattctgatcaagcgttctcaatgtcccacctgtggtgacccaaaaatcttacagcaccgtggtttcgaacctttaaaacttgagtcaaggcctaaacagttcacctcagacggcggacatcgtggtactacccctgaacaaactgtccagaaatatcaacatttaatctcgcctgttaccggtgtagttactgaattggtcaggataactgatccggccaatccactagttcacacatatagagctggtcatagcttcgggagcgctacatcgctgagagggctgcgtaataccttaaagcataagagttcaggtaagggtaagactgattctcaaagtaaagcctcgggcctgtgtgaggcggtagaacgttactcaggaatctttcaaggtgacgaaccgagaaaacgcgccacattggctgaattgggagatttggcaattcaccctgagcaatgcttgtgtttttccgacggtcagtacgctaatagagaaactttaaacgaacaggcaacggtggcacatgattggatacctcaacgttttgatgcatcacaagctattgaatggactccagtctggtccctaactgaacagacccataaatatttgcccaccgcattgtgttactaccattatcctctacccccagaacacagattcgcacgtggagattcgaatggtaatgctgccggaaatacgttggaagaggctatactccaaggcttcatggaattagtcgagagagatggtgtggctttatggtggtataacaggctacgcagacccgctgtagacttaggctcatttaacgagccatacttcgttcagttgcaacaattctacagagaaaacgatagagatttgtgggttttggacttgacagctgatttaggtatcccggctttcgcgggcgtttctaatagaaaaactggtagttcggagaggttgatattaggattcggtgcacacctcgatcctactattgcaattctgagagcagttacagaagttaaccagattggccttgaattagataaagttccagacgagaaccttaagagcgacgcaacagattggctaattactgaaaaattagctgaccacccttatttgttaccagatacaactcaacctctaaaaactgctcaagattatcctaaaaggtggtctgacgatatatacacggacgtaatgacttgcgttaatattgctcaacaagcaggacttgaaactctagttattgatcaaacacgtccggacattggtttgaatgttgttaaggtgacagtcccggggatgaggcacttttggtcaagatttggagaggggaggctttatgacgtgcccgtcaaattaggttggcttgacgaacctttgaccgaagcgcaaatgaaccccacgccgatgcctttt

SEQ ID NO: 495 - DNA, 1987 bp, Artificial Sequence
  Synthetic
atgtcaaaacacgaactctctttagtggaagtaacgcattacacagatcctgaagttctggccattgttaaagattttcatgtcagaggtaactttgcttccctccccgaatttgctgaacgaactttcgtgtccgcggtacctcttgcccatctggagaaatttgaaaataaagaagttctcttcaggccaggtttcagctccgtaataaacatatcctcatcacataattttagtcgtgaaaggctcccatcaggaataaacttttgcgacaaaaataaactttccattcgtactattgaaaagttattagtcaatgcattcagctcacctgatcctggctctgtaaggcggccttatccttctgggggggcattgtacccgattgaagtttttttatgcagattatctgaaaatacagaaaactggcaggcaggaactaatgtttatcactacctgccgctaagtcaggcactagaacctgttgctacatgtaatactcagtcactctaccgaagcctgtccggtggggattcggaacgtcttggtaaaccccattttgctctcgtctattgcattatttttgaaaaagctttgttcaaatatcgctacagaggataccggatggccttaatggaaacaggttcgatgtatcagaacgcagtattggttgcagatcaaataggactgaaaaaccgggtatgggcgggatataccgattcatacgtagcaaaaacaatgaatctggatcagaggactgtagcgccactgatcgttcagttttttggagatgtaaacgatgataaatgtctacagtaaccttatgtccgcatggccggccacaatggccatgagtccaaaactgaacagaaatatgccaacgttttctcagatatgggactatgagcgtattacaccagccagcgcggccggtgaaactctgaagtcaattcagggggcaataggtgaatattttgaacgccgtcatttttttaatgagatagtcaccggtggtcagaaaacattatatgagatgatgcctccatctgctgcaaaggcttttaccgaagcattttttcagatctcatcactgacccgcgatgaaatcataacccataaatttaaaacggtcagagcctttaatctgtttagccttgaacaacaagaaatacctgcagtcataattgcactcgacaatataaccgctgcagatgatctgaaattttatcctgacagagatacatgcggatgtagctttcatggtagtttgaacgatgccatagaaggttccttgtgtgaatttatggagagacagtccctccttctttactggttacagggaaaagccaatactgaaatatccagtgaaatagtaacaggcataaatcatatagatgagattttactggctctcaggtcagaaggagatatcaggattttcgatatcaccctgcccggagctcctggacacgcagtactaaccctgtatggcacaaaaaacaaaatcagtcgaataaaatacagtaccggattatcctatgctaatagtctgaaaaaagcactttgtaaatccgtagtggaattgtggcaatcgtatatatgcctgcacaactttcttattggcggttatactgatgatgacattattgatagttaccagcgtcactttatgtcatgcaacaagtacgagtcgtttacggatttgtgtgaaaatacggtactactgtctgatgatgtcaagttaacgtttgaggaaaatattacgtcagacacaaatttattaaactatcttcaacaaatttctgataatatttttgtttactatgccagggaaagagtaagtaacagccttgtctggtacacaaaaatagtaagccctgattttttccttcatatgaataactcaggtgcaataaacattaataataaaatttaccataccggggacggtattaaagtcagagaatcaaagatggtaccattccca

SEQ ID NO: 496 - DNA, 972 bp, Artificial Sequence
  Synthetic
atgaccgttttaattgttacttttagccacgataatgaaagtattcctctggtaatcaaagccatagaagccatgggtaaaaaagccttccgttttgatactgatcgcttccctacagaggtgaaagttgatctttactcaggcggtcaaaaaggcggaattattaccgatggagaacaaaaattagagctaaaagaagtttcttctgtctggtatcgacgcatgagatacggactaaaattacccgatgggatggatagtcaatttcgcgaagcttctcttaaggaatgtcggttaagtattcgaggaatgattgctagtttatctggctttcatcttgatccaattgctaaggtagatcatgctaatcataaacaattgcagttacaagtggcgcaacaattaggtttattaattccggggactttaacttctaataatcctgaagctgtcaagcaatttgctcgggagtttgaagcgacgggaattgtgactaaaatgctttctcaatttgctatttatggagacaagcaagaggaaatggttgtttttaccagtcctgttacaaaggaagatctagataatttggaaggtttgcaattttgtccaatgacttttcaggaaaacattcctaaagctttggaattacgcatcactatcgtcggtgaacaaatatttacggcggcgattaattcccaacaattagacggtgctatctacgattggcgaaaagagggacgcgcgctccatcaacaatggcaaccctacgatttaccgaaaactattgaaaaacaactactagaattagtgaaatatttcggtcttaattatggtgcaattgatatgattgtcacaccagatgaacgttatatctttttagaaattaatcccgttggcgagtttttctggctagaactttatcctccttattttcctatctcccaggcgatcgctgaaatcctagttaactca

SEQ ID NO: 497 - DNA, 681 bp, Artificial Sequence
  Synthetic
atgacggcacacagcgacgcaggaggtgacccacgcccgcctgaacgcttactgttgggggtgtcaggaagtgtcgctgcactgaacttaccggcgtacatttatgcctttcgggcagccggtgtggcacgtcttgcggtcgtgctgacaccagcggctgaagggttccttccagcgggtgcgttacgcccgattgtggatgccgttcatacggaacatgaccaaggcaaaggtcacgtagcgctgtcacgctgggcgcaacacttactcgtgctgccggcaacagcgaatttgcttggctgtgcagcgtcaggacttgcgccgaactttttagcgaccgttctgctcgcggcagattgcccaatcacattcgtcccggcgatgaatccggtcatgtggcgtaaaccagccgtacgccggaacgttgcaaccttacgcgcagatggtcatcacgtggtggatcctctgccgggcgctgtgtacgaagctgcctcacgttctatcgtggaaggtcttgctatgccgcgccctgaagcgttagtccgtttactgggtggcggtgatgacggttctccagcaggaccggcaggtccggttggacgcgcagagcatgttggggctgttgaggctgttgaagccgtggaagcagttgaggccgttgaggctgcggaagcacttgcg

SEQ ID NO: 498 - DNA, 1704 bp, Artificial Sequence
  Synthetic
atggcacgtagtgaggaatcgaacactctggcacgtctgtttgacgtgttgggtgacgatgccgctgccgcacgtgaatgggtaacggaaccccatcgtctgatcgctagcaatgagcgcctgggcacagctccggaagccccggcggatgacgatccggaggccattcggacggttggagtgatcggagggggcacagccgggtatttaacggcgttggctctgaaggctaaacgcccttggttggatgtggcgctcgtcgaaagtgcggatatcccgatcattggggtaggagaggcgacggtgtcttatatggtgatgtttctgcaccattatctgggcattgatccggcggagttttaccaacatgtgcgccctacttggaaactgggcatccgttttgaatgggggtcacgtccggagggctttgttgcgccattcgattgggggaccggatctgttggcctggttgggagcctgcgtgaaacgggcaatgtcaacgaagctacgttacaggcgatgctcatgacggaggatcgcgttccggtatatcgtggcgaaggtgggcatgttagtctgatgaaatatctgccattcgcatatcatatggataacgctcgcctggttcgctacctgacggaactcgccactcgtcgtggcgtgcatcatgtcgatgcgactgtagctgaagttcgcctggatggtcctgaccacgttggggacctgattactacggacggtcgtcgcctgcactatgacttttacgtcgattgtactggatttcgttccctgctgctggaaaaagccctgggtatcccgttcgaatcttatgcgtcaagcctgtttaccgacgcggcaattaccggtacccttgcacatgggggtcatcttaaaccttacactacggcaactaccatgaatgcgggctggtgttggacgatccctactcctgagtccgatcacctggggtacgttttcagtagtgccgcgatcgatccagacgatgcagcagcagaaatggcccgccgtttcccgggcgttacccgcgaagcattagttcgctttcgctccggccgtcaccgtgaagcttggcgcggcaatgtcatcgcggtaggaaacagctatgctttcgtggaacctctggagagttcgggactcctgatgattgctaccgcagtccagatcctggtgagtttgctgccgagtagtcgtcgtgacccgctgcctagcaatgtggcgaatcaggcgttagctcaccggtgggacgcgattcgttggtttctgagtattcattaccgtttcaacggccgcctcgatactccgttctggaaggaagcccgtgccgaaacagatattagcggtattgaaccgttgcttcgtctgttcagtgccggtgcccctctgaccggtcgcgatagctttgcgcgctatttggccgacggagcagccccgttgttctatggcctggagggtgttgataccttactgctgggacaggaagtgcctgcgcgtctgttaccaccgcgtgaatctcctgagcagtggcgtgcccgtgctgcagcagcccgctcattagcctcgcgtggcttacgtcagagcgaagctctggatgcttacgctgcggacccctgtctcaatgcggaactgctgtctgatagcgactcatgggcgggtgaacgcgtcgcggtacgtgcaggtctgcgt

SEQ ID NO: 499 - DNA, 1242 bp, Artificial Sequence
  Synthetic
atgatttttggcccggattttcatcgcgatccgtatccagtgtatcgtcgtctgcgtgatgaggctccgtgccaccatgaaccagcgttaggtctgtatgcgttgagccgctacgaggacgttctggctgcccttcgtcagcccaccgtgttcagctcagcagcgcgtgcggtagcctccagtgcagcgggagcaggtccataccgcggtgccgacaccgttagtccggagcgggaaactgcggctgaagggcccgcccgtagcctgttgttcctggatccgccagagcaccaggtgctgcgtcaggcggtgtcccgtggctttacgccgcaggcagtattgcgccttgagccggccgtccgcgacattgcggcgggtcttgctgatcgtatccccgatcgcggtggtggcgagttcgttaccgaatttgcggctccgctggcaatcgcagtgattctgcggttacttggtgtaccggaagcagatcgtgcccgcgtaagcgaacttttatcggcatcagccctgtcgggggcggaagcagaactgcgctcctattggctgggcctttcggcactcctccgcgatcgtgaagatgcaggcgaaggtgacggagaggatcgtggtgtggtggcggctctggtccgtcctgatgctggactgcgcgacgcggatgttgccgcaggacctgccgtgcgtgcaccgctgacggatgagcaggttgcagcattctgcgccttagtggggcaagccggcactgaaagtgtggcaatggcgctctccaacgcattggtcctgttcgggcgtcaccatgaccagtggcgcacactgtgtgcgcgtccggatgcgattccagcagcattcgaagaggtcctccgctattgggcacctacgcagcatcaaggtcggacgttaaccgcggcggtacgtttacatggccgtctgctgccggccggtgcgcatgtactgctgctgaccggttcagccggccgggatgaacgtgcgtacccagaccccgatgtatttgacatcggtcgcttccacccggatcgtcgtccgtcgaccgcgctgggttttggtctgggcgcacacttttgtttaggcgctgctctcgctcgtctgcaggcacgcgtagcgctgcgcgaactgacacgccggttcccgcgttatcgtacggacgaggaacgcactgtgcgttcggaagtgatgaacgggttcggccacagccgtgtaccattttccacg

SEQ ID NO: 500 - DNA, 534 bp, Artificial Sequence
  Synthetic
atgacgactggcaccacggtagcgcatgctgtagaaccagacggtttccgcgccgtgatggccacactgccggccgctgtggcgatcgttacggcagctgcggcagatgggcgcccgtggggtatgacctgcagttcggtttgctcagtgaccttgaccccgccgacccttctggtctgccttcggacggcgtccccgactctggccgcagtcgtgtcaggtcgtgcatttagcgtgaaccttctgtgtgcgcgggcctatcctgtggcggaattgtttgcatctgcggcagcagaccggtttgatcgcgttcgttggcgtcgcccgccgggtacaggcggtccacatcttgccgatgatgcacgtgcagtgttagactgtcgcctgagcgaaagcgcagaagtaggcgaccatgtggtcgtatttggccaagtccgggcgattcgtcgcctgagtgatgaaccaccactgatgtatggttatcgtcgttacgcaccttggccggcagatcgtggtccgggtgcggcaggcggc

SEQ ID NO: 501 - DNA, 1119 bp, Artificial Sequence
  Synthetic
atgagcctgacgaatgtcaagccgttgattaaagaatcccaccacatcattttagctgacgatggtgacatttgcattggggaaattccgggggtgtctcaggtaatcaatgacccgccgtcgtgggttcgtcctgccctggcaaagatggatggcaagcgtactgtcccccgtattttcaaagaactggtcagtgaaggcgtacagatcgaatccgaacatctggaaggcctggtagccgggcttgccgaacgcaaacttctccaggataacagtttcttttccaaggtgttaagcggtgaagaagtggagcgctataaccgccagattctgcagttcagccttatcgatgcggataaccagcaccctttcgtttaccaagagcggctgaaacagtctaaagtcgctatcttcggtatgggtggctggggcacgtggtgtgcattgcagctggccatgtcaggcattggtacactgcggctgatcgacggcgatgatgtggaactgtcgaacattaaccgccaagttctgtatcgcacggatgatgtaggtaaaaacaaagttgatgccgccaaagacactatcctggcatacaacgaaaacgtgcatgttgaaaccttctttgaattcgccagcccggaccgtgcccggcttgaagaacttgtgggtgattctacctttattatcctggcttgggccgcgttgggttactaccgtaaagatacggcagaggaaattatccattcgattgcgaaagataaagcgatccctgtaattgaactcggcggtgatcctttggaaatctctgtcggtcctatttacctgaatgatggcgtacacagcggcttcgacgaggtgaaaaattccgttaaagataaatactacgacagcaacagcgatatccgcaaatttcaagaggcgcggttgaaacacagcttcatcgatggcgatcgtaaagtgaacgcgtggcaatcagcgcccagcctgagtattatggctggtatcgtaacggatcaggttgtgaaaaccattaccgggtacgacaagccacatctcgttggcaagaaatttatcttgagtctgcaagatttccgcagccgcgaggaggagatctttaaa

SEQ ID NO: 502 - DNA, 939 bp, Artificial Sequence
  Synthetic
atgaccgaacgtgccgcagtgcgtaccgaccattataaagcctttgggtttagaattgaaagcgatttcgtgctcccggaacttccgcccgcaggcgaacgcgaaccgctcgataatattacggttcgtcgtaccgacctgcagccgctctggaattctagtatccatttttacggaaactttgccattctggatcacggacgcacggttatgtttcgagttccgggtgctgctatctatgcggtacaggatgctagcagcatattagtgtccccattcgatcaggcagaagaaaactgggtacgtctttttattctgggtacctgtattgggatcatcctgctgcagcgtaagattatgccgctgcacggtagcgccgttgccattgatggcaaagcctacgcgattatcggcgaatctggtgccggcaaaagcactcttgcactgcatcttgtcagtaagggttatccattgctttcggatgatgtgattccggtcgttatgacccagggctccccctgggtggtgccgtcgtacccgcaacaaaaactttgggtggacactctgaagcacatgggaatggataatgcaaactatacgccgctgtacgaacgtaaaacgaagttcgcggtgcccgtgggcagtaatttccacgaagaaccgctgccgttagctagcattttcgagcttgtcccgtgggatgcggcaacgcacattgccccgatccaagggatggaacgctttcgtgtcctgttccaccacacttatcggaactttctggttcagccgctgggtcttatggaatggcattttaaaactctgagctcgttcgttcaccaaattggaatgtatcgtctgcatagacctatggtcggattcagtaccttagatttaacgtcgcacattctgaatataacgcgtcagggagagaacgatcaa

SEQ ID NO: 503 - DNA, 1296 bp, Artificial Sequence
  Synthetic
atggggaatttgcgtgatttctaccaactgatgaaagataactatgcggactctaatctgttcaaggatttgaatctgatccacaatatctccaacgacatccaaattggaattaattgcgatttctctgaaatgctgggagaactggtaggtaattacgattccctgaactatccgtcaatcacctgtggtattctgacgtataatgaagaacgctgcattaaacgttgtctggaaagtgtggtgaacgaattcgatgagattattgtcttggatagtgtatccgaggacaataccgtgaaaattatcaaggagaatttcaacgatgtcaaagtctacgtcgagccatggaagaacgatttttcatttcaccgcaacaagatcattaatctcgcaacgtgcgactggatctactttatcgacgcggataattattatgattcgaagaacaagggtaaagccatgcgcatcgctaaggttatggatttcttgaaaatcgaaggcgttgtgagcccaacggtcattgagcatgacaatagcatgagccgtgatacccgtaagatgtttcgtctgaaagataacattctgtttagcggtaaagttcatgaagaaccggtgtatgccaatggtgagatcccccggaacatcatagtagacatcaacgtgtttcacgacggctataacccaaagattatcaacatgatggaaaagaacgagcgcaatatcaccctgactaaagagatgatgaagatcgaaccgaacaatccgaaatggctgtacttctatagccgcgaactctatcagacgcaacgtgacattgcccttgtgcaaagtgtactgttcaaggcactggaactgtatgaaaacagttcatatacgcgttattatgttgacaccattgccttactgtgccgagtgctgttcgaatctaaaaactaccagaaacttacggaatgtctgaacatcctggagaacaatacgcttaactgttccgatatcgattactataattcagcgctgctgttctacaacctgttactgcgcatcaagaaaattagctccaccctgaaggagaacattgatatgtacgaacgtgactatcatagctttatcaacccctcgcatgatcacattaagattctgatattaaatatgctcctgctgctcggcgattaccaggatgcctttaaggtttacaaggagatcaagtccattgagattaaagatgagtttctggtgaacgtgaacaaattcaaagacaatcttctgagcttcattgactccattaacaaaatt

SEQ ID NO: 504 - DNA, 1401 bp, Artificial Sequence
  Synthetic
atggcaaacctgatccaggaccgcgaggacgaactgattcatttccatccgtacaaactgttcgaggtggattcaaaaaccttcttctataacgtagtcaccaacgcgatttttgaaattgatagcctgataatcgacattcttcactcaaaaggtaaaaatgaggagcacgttgtgaaagatttggctgaacgctatgagctgtctcaggttcgcgaagcgatccagaacatgaaagaggcatacattatagcaaccgatgctaacatctccgacgtagagaagatgggtatcttagataactcgcagcgcgtttttaaactgtctagcctgacgctctttatggtgcaggaatgcaacctgcggtgtacgtattgttacggcgaagaaggagaatacaaccagaaaggtaaaatgacgtccgaaatcgcccggagcgcagtggattttctgattcaacagagtggtgaaatcgaacagttgaacatcacattctttggaggcgaaccgctgctcaactttccattaatacaagaaaccgtgcagtatgtgcacgaacagagcgagatccataacaagaaatttagcttttccatcaccaccaatggcacgctcattacccccaaaatcaaaaacttcttctataaacaccactttgcagtccagacttctatcgatggtgatgaaaagacgcacaatttcaatcgcttcttcaaaggaggccagggctcttatgatctgctgttaaagcggacggaagaaatgcgcaatgaccgtaaaattggtgcacgtggaaccgtgacccctgccgagctggacctctcaaaatcatttgaccacttagttaaactcggctttcgcaaaatctacttatcacccgctttatatagtctctctgacgatcactacgacaccctgagcaaagagatggtcaaacttgttgaacaattccgtgagctgctggagcgtgaagattacgtcaccgcgaagaaaatgtctaatgttctgggtatgttatcgaagattcactccggtggcccgcgcattcatttttgcggtgccggcactaatgctgccgctgtcgatgtccgcggcaaccttttcccgtgtcatcgtttcgtgggtgaagatgaatgttcaatcggtaacctgttcgacgaggacccgctgtcaaaacagtacaactttatagagaattctacagtacgcaaccgtactacgtgttcgaaatgctgggcgaagaatctgtgcggcggtggttgtcaccaagaaaatttcgccgagaatggtaatgtgaaccagccagtgggcaaattatgcaaagtgaccaaaaacttcatcaacgcgaccatcaatctgtacttgcaacttactcaagaacaacgcagcattctgttcggc

SEQ ID NO: 505 - DNA, 1041 bp, Artificial Sequence
  Synthetic
atgcacgatcgtagcgcgaatgttagctggaccaaatacatcgcgtttggtctgcgcattgccagcgaactcaacttaccggaactgatattggcggctcccgaagccgttgaggatgttgtcatacgccaggcagatctcacggcctggtctggccaacttgaacaggcaaattttgtcatgttggacgaacgtttcatgtttcagatcccggggaccgccatttatgcggtacgcgaaggcaaagagattgaagtgagcatcttctctggggccgacccggacaccgtgcgccttttcgtgctggggacgtgcatgggcgtgctcttgatgcagcgccgcattctgcctatccacggctccgccgtcgttatcggtggccgcgcgtatgcctttgttggtgaatcaggcacaggtaaatcgaccttagctgcagcatttcggcaggccggttaccaaatggttagcgatgatgtcattgccgtcaaagcgaccgcatctagcgctattgtttaccctgcgtatccacagcaaaaactgggtttagattcgctgttgcagcttgaagcgctccgtgagaataagcacgcccgcaagcgtaacaacatccgttctctgacggatggcaatagtgtgatgccgcagtacagcgatctgcgcatgctggcgggggaactgaataaatatgcagttccagccgtcgatgaattctttaatgacccgctgccgttgggcggtgttttcgaactggtagcagacagtccgattcgagcattaatgcgcgaaggcgaactcgtcgctgtgaccgagcaaccgctgaacgttctggaatgtttacatactcttctgcaacacacgtaccgtcgggtaatcatccctcgaatgggactgagcgagtggagcttcgatactgcggcccgaatggcacgcaaggtcgagggctggcgactcctccgtgatagctccgtgttcacggctagtgaagtcgtccagcgcgtcctcgacatcatccgtaaggaggaaaagagctacggatcacac

SEQ ID NO: 506 - DNA, 1116 bp, Artificial Sequence
  Synthetic
atgctgtctagcgcgctggaggtggatatcgatgaagctgcggtggcggcggacttacgcgaattggccgcagctctggatcgcagtggttatggtgaaatcctcacctgttttctgcctcagaaggcacaggcgcatatctgggctcagaccgctgcaaaaattgatgggccgttgcgtaccctgatggaattattccttctgggtcgggcggttccccaggatgatctcccgcctcgcatcgcggccgtgattcccggtttagttagcgcaggtctggttaagactggacagggcgcggtttggctgccgaacttgattctgctgcgtcctatgggccagtggttatggtgtcagcggcctcacccctcaccgaccatgtactttggtgacgatagcctggcgctggttcaccggatggtaacatatcgtggcggccgtgccctggatttatgtgcaggtccgggtgttcaggcccttaccgcagccctccgctcagagcacgttaccgcggttgagatcaatccggtcgcggcagccctttgccgcaccaacattgccatgaacggtctgtccgaccgcatggaggttcgcctgggctcactgtacgacgtcgtgcgcggtgaggtttttgatgatattgtatcaaacccgccgctgctgcctgttccggaggatgtgcaattcgcctttgtgggagatggcggacgcgatggtttcgatatttcttggacgattctggatggcctgcctgaacatctgtccgaccgtggtgcgtgtcgcatcgttggttgtgttctgtccgatggctatgtgcctgttgtgatggaaggcttgggagaatgggccgctaaacacgatttcgacgtgcttcttacagtgaccgcacatgtcgaggcgcataaagatagtagttttctgcgttcaatgagcctgatgagttcggcgatctcaggccgcccagcggaggagctgcaagaacggtacgcagctgattatgccgaactgggcggttcccacgttgcgttctatgaactgtgtgcccgccgtggtgggggttctgcacgtctggccgacgtgagcgctacaaaacgcagtgcggaagtgtggtttgtt

SEQ ID NO: 507 - DNA, 1032 bp, Artificial Sequence
  Synthetic
atgacccagtatcccctgtcgcgtccagaaccgctgggcgtgcacccagattatcgtcgcctgcgtgagacttgcccggttgcacgtgtgggtagcccgtatggcccagcgtggcttgtcacccgttacgccgatgtggccgcagttctgaccgatgcccgttttagtcgtgcagccgctccggaagatgatggtggcatcctgctgaacaccgatccgccggaacatgatcgtctgcgtaaactgattgtagcacacacaggcaccgctcgcgtggaacggctgcgtccgcgtgctgaagagatcgctgttgcgttagcgcgccgtatcccgggcgaaggcgaattcattagtgcatttgccgagcccttcagccatcgcgttttgtctttatttgttggccatcttgttgggttaccagcgcaggacctgggccccttagcgaccgtagtgactctggcacccgttcccgaccgcgaacgtggcgcggcatttgcagagctgtgtcgtcggctgggtcgtcaggtggatcgcgaaacgcttgcagtagttttaaacgtggtctttggcggacatgcggctgtagtggccgcgctgggttattgcctgttagctgcattagatgcgccactgccacgtctggccggtgacccagagggcattgccgaactggtggaagaaacccttcgtttggctccaccgggagatcgtacactgttgcgtcgtactacagaacctgtggaacttggcggtcgcacattaccagcgggtgcgcttgtaatcccgtccattgcagccgcaaaccgtgatccggatcgccctgtgggccgtcgtatgccacgtcatcttgcatttggacgtggagcgcatgcctgtttaggcatggcgctggcgcgcatggaactccaggcagcactgaaagcgttagcggaacacgcgccagacgtacggttgccggctggtacaggcgcgctggtccgcacacacgaagaactctcggtgagcccgctcgcaggaatcccaattcaacgc

SEQ ID NO: 508 - DNA, 1260 bp, Artificial Sequence
  Synthetic
atgacataccgtcgcacctcctatgcggtatgggagatcacgctgaaatgcaatctggcatgttcgcactgtggaagtcgtgccgggcacacgcgagcaaaagaactgtccacacaggaagcgctggatctggtccgtcagatggctgatgtcggcattatcgaagttactctgattgggggtgaagcgttcctgcgtccagactggctgcagattgccgaggcgataacgaaagccgggatgctgtgcagcatgactacgggcggttatggcatatcgctggaaaccgcccgcaaaatgaaagcggcaggaatcgcgagcgtgagcgttagcatcgatggcttggaggaaacccatgatcgcttacgcggtcgcaaaggctcttggcaggctgcgtttaaaacaatgagccatttgagagaagtgggcatcttctttggctgtaacacccagattaaccgtctgtcggcccctgaatttccgctgatatatgaacgcatccgtgacgccggggcacgtgcctggcagatccagcttacggtgccgatgggccgcgctgccgataacgcaaatatccttctgcaaccgtacgaactgcttgatctgtatccgatgattgctcgagtggcccgccgggcccgtcaagagggcgtgcaaatccagccaggtaataatattgggtattacggcccttacgaacgtcttttacgtggccgggggagcgatagtgagtgggcattttggcagggctgtgccgcgggcttaagtaccctgggtattgaagcggatggtgctataaaaggttgtccctcactgccaacgagcgcgtataccggcggtaacattcgcgaacatagtctgcgagaaatagtggaagaatcggaacagctgcgttttaacctcggtgcagggacgagccaagggaccgcccacttgtggggcttttgccagacgtgtgaatttagtgaattgtgcagaggtggttgtacgtggacagctcacgtgttctttaaccgccgtgggaataacccgtattgtcatcatcgggcgcttttccaagcggagcagggtatcagagaacgtgtcgtgccaaaggtcgaagctcagggcctgccgtttgacaacggtgaatttgaacttatcgaagaacctattgacgcgcctctgcccgaaaatgatccactgcactttaccagcgacttagtgcagtggtcagcgagttggcaggaagaatcggaatctataggcgcagtggtagac

SEQ ID NO: 509 - DNA, 162 bp, Artificial Sequence
  Synthetic
atggtggaaaacattgataatgaacgtgagaaaagtgcgaacgaaattgaaccggaaagcctgcttctgccgcgccaggcttggcagtcgcagatcgcctatcttaaagcgattctgaaagccaaacaggcgcttgaccggatcgaaaaacgttatctgcgg

SEQ ID NO: 510 - DNA, 1257 bp, Artificial Sequence
  Synthetic
atgaccaaaaagtatcggcgtgtatcctacgcagtgtgggaaatcaccctgaaatgcaatctggcatgctctcattgtggcagccgcgccggccaagcccgtacgaaagagctgagtaccgaagaagcgttcaacctggtccgccagctggccgacgtgggcattaaggaagtcaccctgatcggtggtgaagcctttatgcgttcggattggctggaaatcgcgaaagccgtcactgaagccggcatgatctgtggcatgaccacagggggcttcggggtcagtctggaaacggcgcgtaaaatgaaagaagcgggcattaaaacggtgagcgttagcattgacggtggtattcctgaaacccacgaccgccagcgcggtaaaaagggtgcgtggcatagtgcattccggactatgagccatctgaaagaagtcgggatctacttcggttgcaacactcaaatcaatcgtttatcggcgtcagaattcccgattatctatgaacgtattcgcgatgctggggcacgtgcgtggcaaattcagctgacggttccgatgggcaacgccgcggataacgcagatatgctgctgcaaccgtatgaattgctcgacatctatccgatgttagcccgcgttgccaaacgtgcgaaacaggaaggcgtgcgtattcaggcaggtaacaacatcgggtactatggaccgtatgagcgtctgctgcgtggcagcgacgaatggacgttttggcaaggatgtggtgcgggccttaacaccctcggcatcgaagccgacggcaaaatcaaaggctgtccatccctgccgaccgccgcgtacaccggcggtaacattcgcgatcgcccgctgcgggaaatcgtcgaacagaccgaagaactgaaatttaacttaaaagctggtacagaacaaggtacggaccatatgtggggcttttgtaaaacctgcgaattcgcggaactctgtcgcggcggatgcagctggactgcgcatgtgttctttgaccggcgcggcaataatccgtactgccaccatcgggctctgaaacaagcccaaaaagacattcgcgaacgcttttatttaaaagtgaaagcaaagggcaacccgttcgacaatggtgaatttgttatcattgaagaaccttttaacgctccgttacccgagaatgacctgctgcactttaacagtgatcacattcaatggccagaaaactggcaaaatagtgaaagcgcgtacgcattggccaag

SEQ ID NO: 511 - DNA, 168 bp, Artificial Sequence; identical to SEQ ID NO: 230
  Synthetic

SEQ ID NO: 512 - DNA, 3204 bp, Artificial Sequence
  Synthetic
atggagagtcctagctcatggaaaacatcgtggctggccgccatcgctccggatgaaccccacaaattcgaccgccgcttagaatgggacgagctttcagaggagaacttcttcgcagcactgaactcagaacctgcatcgttggaagaggatgatccatgttttgaagaagcactgcaagacgccctggaggccttgaaggcagcatgggatttaccccttcttcccgtcgataataatcttaatcgtcccttcgtagatgtctggtggcccattcgctgtcactctgcggagagcttgcgtcaaagcttcgtcagtgatagtgctggacttgcggacgagatttttgatcagctggccgattcgttactggaccgtctgtgcgccctgggagatcaggtgttgtgggaggcgtttaacaaggagcgtacaccaggaacgatgttgttagcccacttaggagccgcaggcgacggctccggaccccctgtacgtgagcattacgaacgttttattcagtctcaccgccgtaatggattagcgcctttgcttaaggaattccctgtactgggccgccttattggaacagttttgtccctttggttccaagggagcgtggaaatgctgcaacgtatctgcgctgaccgcaccgttctgcaacagtgtttcgctatcccttgcgggcatcacctgaaaactgtaaagcagggactttctgatccacaccgcggcggtcgcgctgtggcagttttggaatttgcggacccaaattccaccgctaattcaagtatgcacgtagtgtataaaccgaaggatatggctgtggatgcagcttaccaggccaccttagcagatcttaatactcatagcgacctttccccgttgcgcacgcttgccattcataacggcaacggatatggttacatggaacatgtggttcaccatctttgcgctaacgacaaagagctgacaaatttctatttcaacgctgggcgtttaaccgcgcttctgcatcttcttggatgtactgactgtcaccatgaaaatttgattgcatgtggtgatcaattactgttgatcgatacagaaacattattggaggcggatttacccgatcacatttcggatgcttcgagcaccacggcgcaaccaaagcctagtagccttcaaaagcaatttcagcgttctgttttgcgtagcgggttacttcctcaatggatgttcctgggggagtcgaagttggccatcgacatctcggctctgggaatgtccccacccaataagcctgagcgtattgcacttggctggttaggattcaattctgacgggatgatgcctgggcgtgtatcccaaccagttgagattcctacatccttgcccgttgggattggtgaggttaatccctttgatcgttttttagaggatttttgtgatggcttttccatgcaatcagaggcccttattaagcttcgcaaccgttggctggacgttaatggggttcttgctcatttcgcgggtctgccccgccgtatcgttcttcgcgcgactcgcgtatacttcactatccagcgtcagcagttagagcctacggcactgcgctctccacttgcacaggccttgaaacttgagcagcttactcgttctttcttgttggcagagtcaaagcctcttcactggcccattttcgcagctgaagtaaagcagatgcagcaccttgacattcctttcttcacacacttaatcgacgctgacgctctgcagctgggcggcctggaacaagaattaccaggcttcatccagactagtggcttggcagctgcttacgagcgtttgcgtaatttagatacggacgagattgctttccaacttcgtctgatccgcggtgcagtagaggctcgcgagttgcatactacgccggagtcgagcccgacgttgccgccgcctgccacccccgaggctcttatgtcctcttcagccgagactagtttagaagctgctaagcgcatcgctcaccgcttactggagttggcaattcgtgattctcaagggcaagtagaatggctgggcatggatctgggggcagatggagagagcttctcctttggcccagttggcttgagcctttatgggggctcaatcggtatcgctcaccttctgcaacgtttgcaggcgcagcaagtttccttgatggacgcagacgctatccaaacggcaattttacagccccttgtgggactggttgatcaacctagcgacgacggacgtcgccgttggtggcgtgatcagccgctgggcttaagtggatgtggcggtaccttgcttgcacttacacttcaaggtgaacaagcgatggctaattccctgctggccgctgctttgccccgttttatcgaggctgatcagcaacttgacctgattggtggctgcgctggactgatcggttcgttggtacaattaggtactgaaagtgccttacaattagctttgcgtgcgggcgaccatcttattgcgcaacagaatgaagagggggcgtggtctagctcgtcatcacagcccggtttgttgggctttagtcatggtactgcaggttacgcagcagccttagcacacttacatgcattttccgctgatgagcgttaccgcaccgcagccgctgccgctttagcatacgaacgcgcacgttttaataaagatgccggcaactggccagactaccgctcgatcggacgtgactctgattcagatgaaccgtcctttatggcttcctggtgtcacggcgcacccggcattgccctgggccgcgcctgtttgtggggtacggcgctttgggacgaagaatgcaccaaggagatcggaattgggttacagaccacagctgctgtttcgtctgttagtactgaccacctgtgttgtggttcacttggccttatggtattattagagatgctgtcagcaggaccctggcccatcgacaatcaattacgttcccattgccaggacgtagcattccagtaccgcctgcaggctttgcagcgctgttcagccgagccgattaagcttcgttgcttcggtacaaaagagggccttttagtcctgcctggatttttcactggcttatcaggaatgggtttagcactgcttgaggatgatccatctcgcgccgtggtttctcaactgatcagtgcgggcttatggccgacagag

SEQ ID NO: 513 - DNA, 942 bp, Artificial Sequence
  Synthetic
atgacgaatttagacacgagcattgtggtcgtaggaagtccggatgatcttcacgtccagtcagtgacggagggtctgcgtgcacgcggtcacgagccttacgtgtttgacacccaacgttttccggaagagatgacagtgtcacttggtgaacagggtgcctctatttttgtcgatggccagcaaattgcacgtccggcggcggtgtacctccgttcactgtaccagagccccggcgcgtatggggtggatgccgacaaagcgatgcaggataactggcgccgcacattgctcgcttttcgcgagcgtagtaccctgatgagcgctgtgcttctgcgttgggaagaagcggggactgcagtgtataattcgccacgcgcgtcggcgaatatcactaaaccgtttcagctggcgctgctgcgcgacgctggtctgccggtaccacgtagcttgtggacaaacgaccctgaagcagtgcggcggtttcatgcggaagtgggtgactgtatttacaaaccggtcgccgggggagcgcgtacacgcaaactggaagcgaaagatctcgaagcggaccgcatcgaacgcctgagtgcagcgccggtgtgttttcaagaactgctcacaggagatgatgtgcgtgtttacgtgatagatgaccaggtaatatgcgccctgcgcatcgtaactgatgagatcgatttccgccaagcagaggaacgtatcgaggccatcgaaatttcagatgaagtaaaagaccaatgtgtacgtgccgccaaacttgttggcctgcgctacaccggtatggatatcaaagccggcgccgatggtaactatcgtgttctcgaactgaacgcgagtgcgatgtttcgcggtttcgaaggccgtgcgaatgtggatatctgtggaccgctgtgtgatgcattgatcgctcagaccaaacgt

SEQ ID NO: 514 - DNA, 801 bp, Artificial Sequence
  Synthetic
atggattatcatttcatcagcggactgcctcgtgcggggagttcattactggctgcgttactgcgtcaaaatccgcagctgcatgccgatgttacatctccggtggcgcgcctttacgcggccatgctgatgggtatgagtgaagaacacccgagcaacgtgcagattgacgatgcccaacgtgtccgtctgttacgtgcagtatttgatgcgtattatcagaaccgtcaggaactggggacagtgttcgatactaaccgcgcatggtgctctcgcctcacgggcctggcgcgtctgtttccgcgtagtcgcatgatctgctgtgtacgcgatgtgggctggattgttgattcttttgaacgcctggcgcagtcgcagccgttacgcctttcggccctgttcggttacgaccccgaggattcggttagcatgcacgctgacttactcactgcgcctcgcggggtagtgggctacgccctggatggtttacgtcaagcgttttatggagatcacgcggatcgtctgctgttgttacgttatgatacgctggcacagcgtcctgcacaagccatggaacaggtatatgcattcctgcagctccctgcctttgcacatgattatgccggtgttcaggccgaagcggaacgctttgatgccgccctgcaaatgcctggtttgcaccgcgtgcgtcgtggtgttcactatgttccgcgacgttcggttttaccgcctgccctgtttgaccagctgcaggaacttgcattctgggaaagtgcacccagccatggagcgctgctcgtg

SEQ ID NO: 515 - DNA, 2727 bp, Artificial Sequence
  Synthetic
atgacaagccatgcaaccgaggttgaatgggaggaccttctgcgccaagcattacacgcaactggtacaggtgctcgttgggctgtagaggcggacgagatgtggtgccgtgtcgccccggtgcctggaactcgccgcgagcaaggatggaagcttcatgtaagcgcgacgaccgcgagtgcgcccgaagtcttaactcgtgcattaggcgtacttctgcgtgaaaagtccgggttcaaatttgcccgctcacttgaacaagtctcggccttgaatagtcgtgctacgccccgtggtagttcgggtaaatttatcacagtatacccccgctcagacgccgaagccgtcgcactggctcgcgacctgcatgcggcaacggccggcttggctgggccccgtattctttccgatcaaccatacgccgcgcacagcctggtgcattatcgttatggggctttcgtgggacgtcgtcgcctttcagatgacgggcttttagtttggtttattgaggacccagatggcaatcccgtggaggataaacgcaccggacgttatgcgccgcctccctgggctgtatgtccgtttcctgcgagcgtccccgttgcgccccatgacggcgaagctacgagtcgtcctgttgtcttaggtggtcgcttcgcggttcgtgaagccatccgtcaaacgaataaagggggcgtctatcgcgggtcggacacacgcactggcaccggcgtggttatcaaagaggcgcgcccacatgttgaaggagacgccagtgggggcgatgttcgtgactggcttcgcgcagaggcgcgtacgcttgaaaaattaaaaggtaccggcttggcaccagaagcggtggcgttgtttgagcacgctggccacttgttcttagcccaagacgaggtcccgggggttacgttacgcacctgggtagcggaacacttccgtgacgttggaggagagcgctatcgtgccgacgccctggctcaggtggctcgtttagttgatttagtcgcggctgctcatgcacgtggcttggtcctgcgcgattttacaccagggaacgtgatggtccgtccagacggcgaattgcgccttattgatttagagctggcggttcttgaggatgaggccgcattgcctacccacgtcggtaccccggggttttcggcacccgaacgccttgcagacgctccagtgcgtcctactgctgactactattctctgggagccacagcttgttttgtcttggccggtaaagtccctaatttacttcctgaagaacccgtgggtcgcccatcggaggagcgtcttgctgcctggttgactgcatgtacacgtccgctgcgcctgccagatggagtcgttgacatgatcttggggttaatgcgcgatgatcctgcagagcgctgggacccatcccgcgcgcgtgaagcactgcgcaaagctgacccgacagcacgccccggggatgctgatcgcactgcagtacgtcgtacgggttcgtcggcagtggccgggccagttcctgactcacgtacagcagatggtcgtacagcggacggccgttccgcggatgaagttgtggcaggtcttgtcgatcacttagtcgatagtatgaccccggcagatgatcgtctgtggccggtaagcactcttacgggagaatcggatccatgtacagtccagcaaggcgctgctggggtgcttgcggtgttgacccgctacttcgaattgacgggcgatccgcgcttaccaggcttattgtcgacagccggacgttggatcgcagaccgcacggatgttcgttcacctcgtccgggattacatttcgggggacgcggaacagcctgggccttatacgacgcggggcgtgcagtcgacgatcgtcgcttggtggaacatgctctggacttagcattagccccgccccaagcgactcctcatcacgatgtcacgcatgggactgcgggctcaggcttagccgccttgcacctgtggcagcgtactggagatactcgtttcgcggatttagcagtagaggcagctgatcgcttaacagctgcagctcgtcgcgagccttcgggtgttggatgggcagtacctgcagaggccgactccccagaaggaggcaagcgttacctgggcttcgctcatggcgcagctgggattgggtgcttcttattggctgcggcggaacttagtcgtcaacccgatcatcgtgcaactgctttggaagttggcgaaggcctggttgctgatgctgttcgcatcggagaggcggcacagtggcctgcgcaatccggggacttgccgacagcgccttactggtgccatggggcggcaggtatcgggacatttcttgtacgcttatggcaggcgaccggggacgatcgcttcggtgatctggcccgcgggagtgctcacgctgtggccgaacgtgctagtcgcgccccattggcgcaatgtcacggtttggctggaaacggagatttcttgttggatttggcagacgcgacaggcgatcctgtgcatcgcgacaccgcggaagagttagcagggttgatcttggccgaaggaacccgtcgtcagggacatgtcgttttccctaatgagtatggggaagtatcatcttcatggtccgacggtagtgcggggattcttgcgttccttctgcgtacgcgtcatacgggccctcgccattggatggtagaacaacgtggg

SEQ ID NO: 516 - DNA, 954 bp, Artificial Sequence
  Synthetic
atggcggatcatattgcggccggtcatgacaccgtcctgagcctggccgaacggacaggtaccgatccagatctgctgggccgtgtgttgcgcttcctcgcttgtcgtggtgttttcgccgagcctcgcccaggtacttatgccttgacccctctgagcttaactttactggaaggccatccgtccggtttaagagaatggttggatgcgtcgggtgcgggagcgcgcatggacgcggcagttggagatctgcttggcgccctccgctcgggtgaaccgagctatccacgtctgcatggtcgtccgttttatgaagatctggcgctgcacagccgaggccctgcttttgatggactgcgtcatacgcacgccgaatcgtatgttgccgacctgctggcagcctacccgtgggaacgcgttcgtcgcgtggttgatgtaggcggtgggaccggcgtattggtcgaggcgcttatgagaactcatgcgaccctccgtacagtactggtcgatcttccaggcgcggtggctaccgctaccgctcgaattgcggctgcgggttttggcaatagatatacaccggtcacgggttccttctttgatccgctgcctgcgggggcggatgtttacaccctggttaacgtggttcacaactggaacgatgagcgtgcctcagctctgctgcgtcggtgtgcggatgcgggtcgccgcgacagtacgtttgttatcgtggaacgcttagcggacgatgcagaccctcgtgccatcaccgccatggacctccgtatgttcctttttctgggcggtaaagagcgcacggccgcacagattcgcgaagtagctagtgcggctggcatggcccaccaaagcaccattaaaacaccgtctggcctccacttacttgttttccgtaagaaacgtttcgctgctcgcggtcacggtcgtcgcatggtgacc

SEQ ID NO: 517 - DNA, 927 bp, Artificial Sequence
  Synthetic
atgaaaaccattctgattattaccaataccctggatctgaccgtggattatattattaatcgctataatcataccgctaaattttttcgtctgaataccgatcgtttttttgattatgatattaatattaccaatagcggtaccagcattcgtaatcgtaaatctaatctgattattaatattcaggaaattcatagcctgtattatcgcaaaattaccctgccgaatctggatggctatgaaagtaaatattggaccctgatgcagcgcgaaatgatgagtattgttgaaggcattgcagaaaccgctggcaattttgcactgacccgtccgtctgtgctgcgcaaagctgataataaaattgtgcagatgaaactggcagaagaaattggttttattctgccgcagagtctgattaccaattcaaatcaggcggcagcctcattttgcaataaaaataataccagcattgtgaaaccgctgagtaccggccgcattctgggtaaaaataaaattggcattattcagaccaatctggttgaaacccatgaaaatattcagggcctggaactgtctccggcttattttcaggattatattccgaaagataccgaaattcgtctgaccattgttggtaataaactgtttggcgccaatattaaatcaaccaatcaggttgattggcgcaaaaatgatgcactgctggaatataaaccggccaatattccggataaaattgccaaaatgtgtctggaaatgatggaaaaactggaaattaattttgcggcgtttgattttattattcgtaatggtgattatatttttctggaactgaatgccaatggtcagtggctgtggctggaagatattctgaaatttgatatttcaaataccattattaattatctgctgggtgaaccgatttaa

SEQ ID NO: 518 - DNA, 930 bp, Artificial Sequence
  Synthetic
atgacgagaaccaacaccggctatcgttatcgcgcgttcggcctgcgcatagactcagatattccgctgccagaattaggggacggtacgcgccctgatggtgacgcggatctgacggtcgtccggtgtggggaagcggagccggaatgggctgaaggtggtggcgggggtcgtctgtatgccgctgaaggcattgtatcttttcgcgtgccgcagacggcagcgttccgtattactaatggaaatcgcatcgaggtgcatgcctactcgggggctgatgaggatcgaatacgcctgtacgtgttagggacctgtatgggagcgctgttactgcaacgtagaatcttaccgcttcatggttcggtcgtcgcccgtgatggtcgtgcgtatgccatagttggcgaaagcggagcgggcaaatccacgatgagtgcagcacttctcgaacgtggattccgcctcgttacggatgacgtggccgccatcgtgttcgatgagcgtgggaccccactggttatgccggcttatccacagcaaaaactgtggcaggattccctggaccgtctgcaaattgcgggctcgggccttcgtccgctgttcgaacgcgaaacgaaatacgctgtacccgcggatggggcattctggcccgaaccggttccattggtgcacatttacgaactggttcatagcgatggtcaaacgcctgaactgcagccgattgccaaattagagcgttgctataccttgtatcgccacacatttcgtagaagcctgatcgtccccagcggcttaagcgcctggcattttgaaacggcagtgaaacttgcggagaaaacggggatgtaccgtcttatgcgcccggccaaagttttcgcggctcgcgaatctgctcggctgattgaaactcacgccgatggtgaagtgtcacgt

SEQ ID NO: 519 - DNA, 2343 bp, Artificial Sequence
  Synthetic
atgcaaccaaccgccctccaaattaagccccacttccacgttgagataattgagccgaagcaagtgtatctcctgggcgaacagggcaaccacgctctcaccgggcagctctactgccaaattctgcctttcttaaacggcgaatacacccgagaacaaattgtggaaaagctcgatgggcaggtcccggaggaatatatcgacttcgtactcagtcgtctggtggagaagggctatctaactgaggtggctccagaactatccctggaagtggcagcattttggagcgaattgggaattgccccttctgtagtggcagaagggctaaagcagccagtgacagtgacaacggcgggcaagggcattagggaagggatagtggctaacctggcagcagcgctggaggaagctggcattcaggtgtcagacccaagggacccaaaggccccaaaggcaggggattctactgcccagcttcaggtggtgctgaccgatgactatttacagccggaacttgcagcgatcaacaaggaagccttagagcgccaacaaccctggttgctggttaagcctgtgggcagtatcctctggttgggaccgttgttcgttcctggggaaaccggatgttggcactgtcttgctcaacgattgcaaggcaaccgggaagttgaagcatcggtattgcaacaaaagcgagcgctgcaggagcgcaacggtcaaaataaaaatggtgcagtgagttgcttgcccacagcacgggcaaccctaccttctactctacaaacaggtttacagtgggctgccactgagattgctaagtggatggtcaagcggcacctcaatgccatagcaccgggaacggctcgttttcccactctagctggcaagatatttacattcaaccagacgactctggagttgaaagctcatcctctgagccgacgaccgcaatgtcccacctgtggcgatcgggaaactctccaacggcgcgggtttgaaccactgaagctagagtcgcgccccaaacacttcacctccgatggcggtcatcgcgccatgaccccagaacaaacggtgcagaagtaccaacacctcatcgggcccataacgggggtagtgacggaactggtgcgaatttctgaccctgccaatcccttggtgcatacctaccgggctgggcatagctttggcagtgctacgtctctgcgggggctgcgcaatgtcctacgccacaagagttctggtaaaggcaagaccgatagccaatctcgggccagcggactttgcgaggcgatcgagcgctattcgggcatttttcagggagacgaaccccgcaagcgggcaactttggctgagttgggagatttggcgattcatccagaacagtgtttgcactttagcgacaggcagtatgacaaccgggaaagctcgaacgagcgagcaacagtgactcacgactggattccccaacggttcgatgcaagtaaggctcacgactggactcccgtgtggtccctaacggagcaaacccataagtatctgcctacagccctgtgctattaccgataccccttccccccagaacaccgtttctgccgtagtgactccaacggaaacgcggcgggaaataccctggaagaggcgattttgcaaggatttatggaactggtggaacgggatagcgtgtgcctgtggtggtacaatcgcgttagccgtccggctgtggatttgagtagctttgacgagccttattttttgcagttgcagcagttctatcaaactcaaaatcgcgatctgtgggtactggatttaacagcagatttgggcattccggcttttgtaggggtatcgaatcggaaagccggcagctcggaaagaataattctcggctttggagcgcacctggacccgacagttgccatccttcgcgctcttacggaggtcaaccaaataggcttggaattggataaagtttctgatgagagcctcaagaacgatgccacggattggttagtgaatgctacattggcagctagtccctatctcgttgccgatgctagccaacccctcaagactgcgaaggattatccccggcgttggagtgacgatatttacaccgatgtgatgacttgtgtagaaatagccaagcaagcaggtctagagactttggtactggatcagaccagacccgacataggtttaaatgtggttaaagtcattgtgccaggaatgcgtttttggtcgcgatttggctccggtcggctctatgacgtgccagtgaagttgggatggcgagagcaaccacttgctgaggcacaaatgaaccctacaccgatgccattt

SEQ ID NO: 520 - DNA, 135 bp, Artificial Sequence
  Synthetic
atggattcactgctgtcaacagaaaccgtcattagtgatgacgaactgcttccgattgaagttggtggtaccgcggaattgacagaggggcagggcggcggtcagtccgaggataaacgtcgcgcttataactgc

SEQ ID NO: 521 - DNA, 300 bp, Artificial Sequence
  Synthetic
atgccggaaaatcggcaggaagatctcaacgctcaggctgtaccattcttcgcgcgtttcttggagggtcaaaactgcgaggaccttactgatgaggaatcggaggcggttagcggtggaaaacgcggccaaacccgtaaatatccaagcgactgcgaagatgggaatggcgtgaccggtaaactgcgcgatgaagatattgcagtgaccttgaagtacccatccgacaatgaagataatggcggcggtgaaattgtgactctgaagtttccaagtgatgatgatgatcaaccagtaggc

SEQ ID NO: 522 - DNA, 144 bp, Artificial Sequence
  Synthetic
ccgatcattagcgaaacggtccagcctaaaacggctggcctgattgttctgggcaaggcaagcgcggaaacgcgcggattgagccaaggcgtggaaccggacattggtcagacgtacttcgaagaaagccgtattaatcaggat

SEQ ID NO: 523 - DNA, 54 bp, Artificial Sequence
  Synthetic
ctgaaaatccgcaaggtgaaaattgtcagagcgcagaacggccactacacgaac

SEQ ID NO: 524 - DNA, 132 bp, Artificial Sequence
  Synthetic
atgggtccggttgttgtgttcgattgcatgacggccgactttctgaacgacgatccaaataacgcggagttgtctgccttggaaatggaggagctcgagtcctggggcgcctgggacggagaggctaccagc

SEQ ID NO: 525 - DNA, 264 bp, Artificial Sequence
  Synthetic
atgaccaatgaagagatcattgtcgcgtggaaaaaccctaaagtccgtggcaaaaatatgccaagtcacccgagcggcgtgggattccaagagctttccatcaacgagatggcccaagtgaccggcggagcagtagaacagcgtgcaacaccaaccctggcaaccccgctgaccccgcataccccgtacgcaacctatgtggttagcggaggcgtggttagcgcgatttctggtatcttcagcaacaataaaacgtgtctgggc

SEQ ID NO: 526 - DNA, 243 bp, Artificial Sequence
  Synthetic
atgaccaatgaggaaattatcgttgcgtggaaaaacccgaaggtgcgcggcaaaaacatgccttcccatccgtccggtgtgggcttccaggaattatctattaatgaaatggcacaggtgactggtggcgcggttgaacagcgcgcgacgccggcaaccccagcaacaccatggctgattaaagcgtcttatgtggtgagtggggcgggagtttcttttgtcgcaagctatatcactgtaaac

SEQ ID NO: 527 - DNA, 141 bp, Artificial Sequence
  Synthetic
atggtgcgtttcctggctaagctgctgcgttcaacgatccatggctctaatggcgtgagcctcgacgccgtcagttccacgcatggtactccggggtttcagacacctgatgcacgtgttatttcacgctttggctttaat

SEQ ID NO: 528 - DNA, 231 bp, Artificial Sequence
  Synthetic
atgacggcgagtattcttcagtctgtcgttgatgcggactttcgtgcggccctgattgaaaacccagccgcattcggcgcgagcaccgcagttttgccgaccccagtcgaacagcaggatcaggcatcactggatttttggacaaaagatattgctgccactgaggcgtttgcttgcaaacagtcttgctcatttgggccgttcacctttgtgtgcgacgggaataccaaa

SEQ ID NO: 529 - DNA, 114 bp, Artificial Sequence
  Synthetic
actcccattcaatccaaattctgcctcctgcgcgtgggcagtgccaaacggctgacgcagtcattcgacgtgggaactattaaggaaggtttagtcagccagtattattttgcg

SEQ ID NO: 530 - DNA, 117 bp, Artificial Sequence
  Synthetic
acccaggtgagcccatcaccgctgcgcctgattcgcgtcgggagagccttggacctgacccgctctatcggggatagtgggctgcgtgagtccatgtcaagccagacgtactggccc

SEQ ID NO: 531 - DNA, 111 bp, Artificial Sequence
  Synthetic
aacactttaaaaacgcgtcttattcgctttgggtcggctaaacgtctgacgcgcgcaggtacgggcgtgctgttacctgaaaccaaccagattaagcgctacgatccagca

SEQ ID NO: 532 - DNA, 105 bp, Artificial Sequence
  Synthetic
accacacccaaatttcgactgattcggttaggttcagctaagcgattgacccggtcgggaatcggggatgtgtttccggagccaaacatggttcgccgctgggat

SEQ ID NO: 533 - DNA, 129 bp, Artificial Sequence
  Synthetic
cagcgtataatagatgaaaccaccgatggtctgattgaactgggggcggccagcgtacagacacagggcgatgttttgtttgctccggagcctggcgtgggccgacctccaatgggcctttccgaagat

SEQ ID NO: 534 - DNA, 129 bp, Artificial Sequence
  Synthetic
gaacgcattgaagatcatattgatgatgaactgattgacctgggagctgcttcggttgaaacccagggagatgtgctgaatgcaccggagcctggtatcggtcgtgaaccgacaggcttgagccgcgat

SEQ ID NO: 535 - DNA, 129 bp, Artificial Sequence
  Synthetic
gaatttgaaggtatcccatcaccggatgcgcgtattgatttgggtctggcgtcggaagaaacctgtggtcagatttatgatcacccggaagtaggcatcggtgcgtacgggtgcgagggcctgcagcgt

SEQ ID NO: 536 - DNA, 162 bp, Artificial Sequence
  Synthetic
caagatctgattaattacttcctgaattatcctgaggctctgaagaaactcaagaataaggaagcctgcttaattgggtttgacgtccaggaaaccgaaacgattatcaaagcctataacgattactaccgcgctgatccgatcacgcgtcaatggggtgat

SEQ ID NO: 537 - DNA, 219 bp, Artificial Sequence
  Synthetic
atgtccgaactgagtatggagaaagtggtcggcgaaacatttgaggatctgagcatcgcggaaatgacgatggtgcagggcagcggcgacattaacggcgaatttactacctcgccggcatgtgtttattccgttatggttgtatcgaaagcaagcagcgctaaatgtgcggccggtgcatcggcagtctcgggagccattctgagtgcgattcgttgc

SEQ ID NO: 538 - DNA, 198 bp, Artificial Sequence
  Synthetic
atgagcgaatccaacatgaagaaggttgttggcgaaaccttcgaagatctgagcatcgcagaaatgacgaaagttcagggctcaggggacgtgatgccggaatctaccccaatttgtgccggcttcgcaaccttgatgagttctatcggtcttgttaaaaccatcaaaggcaatgtcaaaagtttctccgtcttaatt

SEQ ID NO: 539 - DNA, 123 bp, Artificial Sequence
  Synthetic
accaagaaaaacgcaacacaggccccacgtttagtacgtgtaggcgatgctcatcgtttgacccaaggtgctttcgttggacagccggaagccgtaaatccacttggacgtgaaattcaagga

SEQ ID NO: 540 - DNA, 108 bp, Artificial Sequence
  Synthetic
accaaaacacacagactgatcagattgggcgacgcgcaacgcttgacccagggcacattgactccgggcttaccggaggactttctgccgggccattacatgccgggg

SEQ ID NO: 541 - DNA, 108 bp, Artificial Sequence
  Synthetic
acttcacgtttccaactcctgcgcctgggaaaagccgatcgtttgacgcgtggcgcgctggtcgggctcctgatcgaagatattactgtcgctcgctacgaccctatg

SEQ ID NO: 542 - DNA, 153 bp, Artificial Sequence
  Synthetic
gaagcagttaaagagaagaacgatctgttcaacctggatgttaaagtcaacgcaaaagaaagtaacgatagtggcgcagaaccacgcatagcgtcgaaatttatttgcacaccaggctgcgcgaaaacgggttcgtttaacagctattgttgt

SEQ ID NO: 543 - DNA, 225 bp, Artificial Sequence
  Synthetic
acgaacttgctgaaagaatggaaaatgcccctggaacgtacgcataataactccaacccggcgggagacatttttcaggaactggaagatcaagacatactcgccggtgtgaatggagcagaaaacttatactttcagggttgtgcgtggtataacattagctgccgtctgggcaacaaaggagcctactgcacccttacagttgagtgcatgccctcctgtaac

SEQ ID NO: 544 - DNA, 195 bp, Artificial Sequence
  Synthetic
gtgaattccaaagacctgagaaatccagaatttcgcaaagctcagggtctgcagtttgtagatgaagttaatgagaaggaactctcgagtttagccggcagcgagaatctttactttcaaggcacgacgtggccatgtgcgaccgtcggcgtttcagttgccttgtgcccgacgaccaaatgcacttcacagtgc

SEQ ID NO: 545 - DNA, 258 bp, Artificial Sequence
  Synthetic
aagaacccgacgctgttgcccaaactgaccgcgccggtcgaacgtccggccgtaacttcgtcggatttaaagcaagcctcaagcgtcgatgctgcatggttaaatggcgataataactggtcaaccccattcgccggtgtgaacgcggcatggttaaatggggacaacaactggtccacgccttttgcgggcgtgaatgctgcatggcttaatggcgacaataactggagcactccatttgccgccgatggcgctgag

SEQ ID NO: 546 - DNA, 117 bp, Artificial Sequence
  Synthetic
atggacaaacgtgtgcgttacgaaaaaccgagcctggtgaaagagggtacgtttcgcaaaactaccgctggcctgcggcgtctgttcgctgaccagctggttggccgccgtaacatt

SEQ ID NO: 547 - DNA, 216 bp, Artificial Sequence
  Synthetic
actaaaggcctggacaaaatgcttttaaccaaaaagaagaaggatagtatgggtctgctgaacgaaatcgacgttaccaccctggatgaacagttaggcggtaaaatgagcaaagcatggtgccgatccatggtggtgtcctgcgtgtataacctggttgatttttcgtcgtcgagtgacgggaaaaagacatgtgctctgtaccgcaaatattgt

SEQ ID NO: 548 - DNA, 177 bp, Artificial Sequence
  Synthetic
atgaataaaaacgaaatcgaaacccagccagttacgtggctggaggaagtttctgatcagaattttgatgaggatgtctttggtgcgtgtagcacaaacaccttctcgctgagcgattactggggtaacaacggtgcttggtgtacactcacgcacgaatgtatggcatggtgcaag

SEQ ID NO: 549 - DNA, 195 bp, Artificial Sequence
  Synthetic
atgaaggaaaagaatatgaagaaaaacgacaccatcgaacttcagcttggaaaatacctggaagatgatatgatcgaactggctgaaggggatgagtcccatgggggtactaccccggctacccctgcgatttctatcctcagcgcgtatatcagcaccaatacctgcccgacaactaagtgtacacgcgcgtgc

SEQ ID NO: 550 - DNA, 210 bp, Artificial Sequence
  Synthetic
atggaattaaaagcgagtgaatttggtgtagttttgtccgttgatgctcttaaattatcacgccagtctccattaggtgttggcattggtggtggtggcggcggcggcggcggcggcggtagctgcggtggtcaaggtggcggttgtggtggttgcagcaacggttgtagtggtggaaacggtggcagcggcggaagtggttcacatatc

SEQ ID NO: 551 - DNA, 150 bp, Artificial Sequence
  Synthetic
atggcatatcccaacgatcaacaaggtaaagcacttcctttctttgctcgtttcttgtccgtaagcaaagaggaatcttccatcaagtctccttcccctgagcctacctacgggggcacctttaaatacccttctgactgggaagattat

SEQ ID NO: 552 - DNA, 123 bp, Artificial Sequence
  Synthetic
atggcacttcctttctttgctcgtttcttgtccgtaagcaaagaggaatcttccatcaagtctccttcccctgagcctacctacgggggcacctttaaatacccttctgactgggaagattat

SEQ ID NO: 553 - DNA, 171 bp, Artificial Sequence
  Synthetic
atgccagccgatattctggagactcgtaccagcgaaacggaggacttactggatcttgacctgagcatcggtgtagaagaaatcaccgcaggcccggcagtgacttcttggtcactgtgcacccctggatgcacgagtccgggcggtggctccaattgttcgttctgttgc

SEQ ID NO: 554 - DNA, 90 bp, Artificial Sequence
  Synthetic
atgattaaattttctacattgtctcagcgcatcagcgccatcacggaagaaaacgccatgtacactaagggtcaagtgatcgtattgagc

SEQ ID NO: 555 - DNA, 123 bp, Artificial Sequence
  Synthetic
aaaaagcaatatagcaaacctagcctggaggttctggacgtccaccagaccatggctggcccgggcactagtacgccagacgcgtttcagccagatccagatgaagatgttcactatgattcg

SEQ ID NO: 556 - DNA, 180 bp, Artificial Sequence
  Synthetic
aaagatcttctgaaggaactgatgtatgaagtagacctcgaagagatggagaatcttcagggtagcgggtactcagccgcccagtgtgcctggatggcgctgagctgcgtcaattacatcccgggagtgggattcggttgtggcggctacagcgcatgtgaactctacaagcgttattgt

SEQ ID NO: 557 - DNA, 147 bp, Artificial Sequence
  Synthetic
atgttgaaacagatcaatgtgattgctggcgtaaaagagcctattcgcgcctatggttgttcggctaatgacgcatgctatttttgcgacacgcgtgacaactgcaaagcctgtgatgccagtgatttttgtatcaaaagtgatacg

SEQ ID NO: 558 - DNA, 162 bp, Artificial Sequence
  Synthetic
ttgaaacagatcaatgtgattgctggcgtaaaagagcctattcgcgcctatgagaacttgtatttccagggttgttcggctaatgacgcatgctatttttgcgacacgcgtgacaactgcaaagcctgtgatgccagtgatttttgtatcaaaagtgatacg

SEQ ID NO: 559 - DNA, 123 bp, Artificial Sequence
  Synthetic
agcaagaaagaatggcaagagcccacgatcgaagtgctcgatattaatcagactatggcgggtaagggctggaaacagatagactgggtgagcgaccatgatgctgacttacacaatccgtct

SEQ ID NO: 560 - DNA, 150 bp, Artificial Sequence
  Synthetic
atgaacctgaacgatttacctatggacgtctttgaaatggcagacagcggtatggaggtggaaagcctcacggctggccatggcatgccagaagttggagctagttgcaactgtgtgtgcgggttttgctgcagctgcagtccgagcgcg

SEQ ID NO: 561 - DNA, 432 bp, Artificial Sequence
  Synthetic
atgtcgagtaatatcctcgaaaaagttaaggagtttttcgtccggctggtgaaggatgatgcgtttcaaagccagctgcagaacaacagtattgatgaagttcgaaatatcctgcaggaggccgggtacatattcagcaaagaagaattcgaaaccgcaaccattgaattgctggatttgaaggaacgcgatgaattccacgagctgacagaagaggagcttgtcaccgctgttggcggtgttacgggcgggagtggtatatatggcccgattcaagctatgtacggtgccgtcgtaggtgatccaaaaccgggtaaggactgggggtggcgctttccgagcccgctgccaaaaccgagtccgattccgagtccgtggaaacccccggttgatgtccagcctatgtatggtgtggtagtgtcaaacgatagt

SEQ ID NO: 562 - DNA, 114 bp, Artificial Sequence
  Synthetic
atggagcgcgaaatcgtgtggacagaaattgaggagtcggatttagccgccgtcgtgtcggcatctaatgtcaaggatggtccaaccgttagctcaagtaatgtaaaggaccgc

SEQ ID NO: 563 - DNA, 306 bp, Artificial Sequence
  Synthetic
atgagcattgagaatgccaagagcttttatgaacgcgtcagtacagataagcagttccgcactcaactggaaaatacggccagtgctgaagaacggcagaaaatcattcaggcagcgggctttgagttcaccaatcaggagtgggaaattgcaaaagaacagattcttgcgacaagtgaaagtaataacggtgaactgtccgaggccgaactgaccgccgtcagcggtggggttgacttaagcattttcgagctgctggacgaagaacctttattcccgattcgtcctttgtacggcctgcctatt

SEQ ID NO: 564 - DNA, 294 bp, Artificial Sequence
  Synthetic
atgtctattgagagtgcaaaggctttctaccagcgtatgacggatgacgcatcttttcgtaccccttttgaagcggaactgtcgaaagaggagcgccaacaattaatcaaagatagcggatatgactttactgcagaagaatggcaacaggctatgaccgagatccaggcggcacgctcaaacgaggaactgaatgaggaagaactcgaggcaattgccgggggcgctgtggccgcaatgtatggtgtggttttcccatgggacaacgagttcccgtggccccgctggggcggt

SEQ ID NO: 565 - DNA, 69 bp, Artificial Sequence
  Synthetic
atgtggaagaaacctgcttttatcgatttacgtctcggtctggaagtgacgctgtacatttctaaccgt

SEQ ID NO: 566 - DNA, 240 bp, Artificial Sequence
  Synthetic
atgtcagaagaacaactcaaggcattcattgccaaggttcaagcagacacttcactgcaggaacagctcaaagtagaaggtgctgatgttgttgctattgctaaagcctcagggttcgcgattaccacagaggacctcaattcgcatcgccaaaatctgtctgatgatgagctggagggagtcgcgggaggctttttctgcgtacagggtacggccaaccgtttcactatcaacgtttgc

SEQ ID NO: 567 - DNA, 270 bp, Artificial Sequence
  Synthetic
atgtcagaagaacaactcaaggcattcattgccaaggttcaagcagacacttcactgcaggaacagctcaaagtagaaggtgctgatgttgttgctattgctaaagcctcagggttcgcgattaccacagaggacttaaaagcacatcaagccaactcacaaaagaacctgtctgatgctgagctggaaggtgtggctgggcgaaccattgggggaaccattgtgtcgataacctgtgagacttgcgatctgcttgtggggaaaatgtgc

SEQ ID NO: 568 - DNA, 213 bp, Artificial Sequence
  Synthetic
atgagcaaaaatgagaacaacaagaaacagctgcgcgatcttttcattgaagatctgggcaaagttactggcggtaaaggtggcccgtataccaccttagccattggcgaagaagatccgattaccactttggctatcggagaagaggaccctgatccaacgacacttgccttaggtgaagaggacccaactacgcttgcaatcggcgaagaa

SEQ ID NO: 569 - DNA, 231 bp, Artificial Sequence
  Synthetic
atgagcaaaaatgagaacaacaagaaacagctgcgcgatcttttcattgaagatctgggcaaagttactggcgagaacttgtatttccagggtaaaggtggcccgtataccaccttagccattggcgaagaagatccgattaccactttggctatcggagaagaggaccctgatccaacgacacttgccttaggtgaagaggacccaactacgcttgcaatcggcgaagaa

SEQ ID NO: 570 - DNA, 177 bp, Artificial Sequence
  Synthetic
aaccactctaagaaaagtccggcaaaaggggcagcgtccctgcagcgtcctgctggggcaaaaggccgccctgaacctctggatcaacgcttgtggaaacacgtcggtggtggtgactacccacccccaggagccaacccaaagcatgatccaccaccccgcaatccgggccaccat

SEQ ID NO: 571 - DNA, 129 bp, Artificial Sequence
  Synthetic
atgaaaaaagctgtcattgtagaaaacaaaggttgtgcaacatgctcgatcggagccgcttgtctagtggacggtcctatccctgattttgaaattgccggtgcaacaggtctattcggtctatgggga

SEQ ID NO: 572 - DNA, 399 bp, Artificial Sequence
  Synthetic
tctggtcgcgggcgcgatcctgatgctgctgtacctcccttgcctcgtgtacctcgcactactaatcatgagccacgtacggcgtcccgagaaccaagagcagctccaagaactggacctacacgtccgccttcgtcgcgtccatctccgtgtggtcactctcctcaaacccctggtgcaggacgcagtggatgtcgtgtggagcgtcaaaaatcggctgcggcttcgtctgagaaggaaaagacaatggagaaccaagatttggagttattagcacgcctgcatgcacttcctgagactgaaccggtgggcgtcgacggattaccctatggcgagacttgtgagtgcgtcgggttacttacgttgttgaacaccgtatgtatcggcatttcatgcgct

SEQ ID NO: 573 - DNA, 90 bp, Artificial Sequence
  Synthetic
atgagtaaggaattagaaaaagttcttgaatccagttcaatggcaaagggggacggctggaaggttatggctaaaggtgacggttgggag

SEQ ID NO: 574 - DNA, 108 bp, Artificial Sequence
  Synthetic
aagaaattctatgaagcgccagctctcatcgaacgtggcgcctttgcggctgctacagcggggtttggacgtctgctggcggatcagctggtgggacgcctgattccg

SEQ ID NO: 575 - DNA, 147 bp, Artificial Sequence
  Synthetic
atggacctgaatgatctgccgatggatgtttttgaactggcagatagcggtgttgcagttgaaagcctgaccgcaggtcatggtatgaccgaagttggtgcaagctgtaattgcttttgttatatttgttgtagctgcagcagcgcc

SEQ ID NO: 576 - DNA, 126 bp, Artificial Sequence
  Synthetic
atggataacaaggttgcgaagaatgtcgaagtgaagaagggctccatcaaggcgaccttcaaggctgctgttctgaagtcgaagacgaaggtcgacatcggaggtagccgtcagggctgcgtcgct

SEQ ID NO: 577 - DNA, 189 bp, Artificial Sequence
  Synthetic
tatcgaccttatattgccaagtatgtcgaagaacaaactctgcagaattcaaccaacctggtatatgacgacatcacgcagatctcttttatcaataaagaaaagaacgtgaaaaaaattaatctgggtcccgatactacgatcgtgactgaaaccatcgagaatgcggaccccgatgagtatttctta

SEQ ID NO: 578 - DNA, 123 bp, Artificial Sequence
  Synthetic
cgcaagaaagaatggcagacaccagaactggaagtactcgatgtacgcctcaccgcagcgggcccgggtaaagctaaaccggatgctgtgcagccagacgaagatgaaatagtgcactactca

SEQ ID NO: 579 - DNA, 156 bp, Artificial Sequence
  Synthetic
atgaacaagaagaacattttaccgcagttaggacaaccagtcatccgccttactgccggtcaactgtcaagccaactggcggagctttctgaggaggctctgggaggggtcgatgcctcgtacgcggtgttctggccgatctgtagctatgacgac

SEQ ID NO: 580 - DNA, 195 bp, Artificial Sequence
  Synthetic
atgaacaagaagaacattttaccgcagttaggacaaccagtcatccgccttactgccggtcaactgtcaagccaactggcggagctttctgaggaggctctgggagtcgatgcctcgaccttgccggttccgacgttgtgtagctatgacggggtggacgctagcacagtccctacactttgtagttacgatgac

SEQ ID NO: 581 - DNA, 213 bp, Artificial Sequence
  Synthetic
aacaagaagaacattttaccgcagttaggacaaccagtcatccgccttactgccggtcaactgtcaagccaactggcggagctttctgaggaggctctgggagagaacttgtatttccagggtgtcgatgcctcgaccttgccggttccgacgttgtgtagctatgacggggtggacgctagcacagtccctacactttgtagttacgatgac

SEQ ID NO: 582 - DNA, 2215 bp, Artificial Sequence; identical to SEQ ID NO: 241
  Synthetic

SEQ ID NO: 583 - DNA, 825 bp, Artificial Sequence; identical to SEQ ID NO: 242
  Synthetic

SEQ ID NO: 584 - DNA, 4995 bp, Artificial Sequence
  Synthetic
catttccccgaaaagtgccacctgacgtctaagaaaccattattatcatgacattaacctataaaaataggcgtatcacgaggcagaatttcagataaaaaaaatccttagctttcgctaaggatgatttctggaattcgcggccgcttctagagcgcatcccgaaaatttatcaaaaagagtattgacttaaagtctaacctataggatacttacagccatcgagagctgcgagattccaccatcaaaacacggagagtagcccacatgtcatattaccaccatcaccatcatcacgactatgatattcccacaagcatgaaaatcgaagaaggtaaactggtaatctggattaacggcgataaaggctataacggattggctgaagtcggtaagaaattcgagaaagataccggaattaaagtcaccgttgagcatccggataaactggaagagaaattcccacaggttgcggcaactggcgatggccctgacattatcttctgggcacacgaccgctttggtggctacgctcaatctggcctgttggctgaaatcaccccggacaaagcgttccaggacaagctgtatccgtttacctgggatgccgtacgttacaacggcaagctgattgcttacccgatcgctgttgaagcgttatcgctgatttataacaaagatctgctgccgaacccgccaaaaacctgggaagagatcccggcgctggataaagaactgaaagcgaaaggtaagagcgcgctgatgttcaacctgcaagaaccgtacttcacctggccgctgattgctgctgacgggggttatgcgttcaagtatgaaaacggcaagtacgacattaaagacgtgggcgtggataacgctggcgcgaaagcgggtctgaccttcctggttgacctgattaaaaacaaacacatgaatgcagacaccgattactccatcgcagaagctgcctttaataaaggcgaaacagcgatgaccatcaacggcccgtgggcatggtccaacatcgacaccagcaaagtgaattatggtgtaacggtactgccgaccttcaagggtcaaccatccaaaccgttcgttggcgtgctgagcgcaggtattaacgccgccagtccgaacaaagagctggcgaaagagttcctcgaaaactatctgctgactgatgaaggtctggaagcggttaataaagacaaaccgctgggtgccgtagcgctgaagtcttacgaggaagagttggcgaaagatccacgtattgccgccaccatggaaaacgcccagaaaggtgaaatcatgccgaacatcccgcagatgtccgctttctggtatgccgtgcgtactgcggtgatcaacgccgccagcggtcgtcagactgtcgatgaagccctgaaagacgcgcagactcgtatcaccaagtcgtactaccatcaccatcaccatcacggcggtagtggcgaaaacctgtattttcagggtatgaacaagaagaacattttaccgcagttaggacaaccagtcatccgccttactgccggtcaactgtcaagccaactggcggagctttctgaggaggctctgggaggggtcgatgcctcgtacgcggtgttctggccgatctgtagctatgacgactaataattcagccaaaaaacttaagaccgccggtcttgtccactaccttgcagtaatgcggtggacaggatcggcggttttcttttctcttctcaactgtactagtagcggccgctgcagtccggcaaaaaagggcaaggtgtcaccaccctgccctttttctttaaaaccgaaaagattacttcgcgttatgcaggcttcctcgctcactgactcgctgcgctcggtcgttcggctgcggcgagcggtatcagctcactcaaaggcggtaatgacagtaagacgggtaagcctgttgatgataccgctgccttactgggtgcattagccagtctgaatgacctgtcacgggataatccgaagtggtcagactggaaaatcagagggcaggaactgctgaacagcaaaaagtcagatagcaccacatagcagacccgccataaaacgccctgagaagcccgtgacgggcttttcttgtattatgggtagtttccttgcatgaatccataaaaggcgcctgtagtgccatttacccccattcactgccagagccgtgagcgcagcgaactgaatgtcacgaaaaagacagcgactcaggtgcctgatggtcggagacaaaaggaatattcagcgatttgcccgagcttgcgagggtgctacttaagcctttagggttttaaggtctgttttgtagaggagcaaacagcgtttgcgacatccttttgtaatactgcggaactgactaaagtagtgagttatacacagggctgggatctattctttttatctttttttattctttctttattctataaattataaccacttgaatataaacaaaaaaaacacacaaaggtctagcggaatttacagagggtctagcagaatttacaagttttccagcaaaggtctagcagaatttacagatacccacaactcaaaggaaaaggactagtaattatcattgactagcccatctcaattggtatagtgattaaaatcacctagaccaattgagatgtatgtctgaattagttgttttcaaagcaaatgaactagcgattagtcgctatgacttaacggagcatgaaaccaagctaattttatgctgtgtggcactactcaaccccacgattgaaaaccctacaaggaaagaacggacggtatcgttcacttataaccaatacgctcagatgatgaacatcagtagggaaaatgcttatggtgtattagctaaagcaaccagagagctgatgacgagaactgtggaaatcaggaatcctttggttaaaggcttttggattttccagtggacaaactatgccaagttctcaagcgaaaaattagaattagtttttagtgaagagatattgccttatcttttccagttaaaaaaattcataaaatataatctggaacatgttaagtcttttgaaaacaaatactctatgaggatttatgagtggttattaaaagaactaacacaaaagaaaactcacaaggcaaatatagagattagccttgatgaatttaagttcatgttaatgcttgaaaataactaccatgagtttaaaaggcttaaccaatgggttttgaaaccaataagtaaagatttaaacacttacagcaatatgaaattggtggttgataagcgaggccgcccgactgatacgttgattttccaagttgaactagatagacaaatggatctcgtaaccgaacttgagaacaaccagataaaaatgaatggtgacaaaataccaacaaccattacatcagattcctacctacataacggactaagaaaaacactacacgatgctttaactgcaaaaattcagctcaccagttttgaggcaaaatttttgagtgacatgcaaagtaagtatgatctcaatggttcgttctcatggctcacgcaaaaacaacgaaccacactagagaacatactggctaaatacggaaggatctgaggttcttatggctcttgtatctatcagtgaagcatcaagactaacaaacaaaagtagaacaactgttcaccgttacatatcaaagggaaaactgtccatatgcacagatgaaaacggtgtaaaaaagatagatacatcagagcttttacgagtttttggtgcattcaaagctgttcaccatgaacagatcgacaatgtaacagatgaacagcatgtaacacctaatagaacaggtgaaaccagtaaaacaaagcaactagaacatgaaattgaacacctgagacaacttgttacagctcaacagtcacacatagacagcctgaaacaggcgatgctgcttatcgaatcaaagctgccgacaacacgggagccagtgacgcctcccgtggggaaaaaatcatggcaattctggaagaaatagcgctttcagccggcaaaccggctgaagccggatctgcgattctgataacaaactagcaacaccagaacagcccgtttgcgggcagcaaaacccgtaccgattatcaaaaaggatcttcacctagatccttttaaattaaaaatgaagttttaaatcaatctaaagtatatatgagtaaacttggtctgattacgccccgccctgccactcatcacagtactgttgtaattcattaagcatgcggccgacatggaagccatcacaaacggcatgatgaacctggatcgccagcggcatcagcaccttgtcgccttgcgtataatatttgcccatcgtgaaaacgggggcgaagaagttgtccatattggccacgtttaaatcaaaactggtgaaactcacccagggattggctgagacaaaaaacatattctcaataaaccctttagggaaataggccaggttttcaccgtaacacgccacatcttgcgaatatatgtggagaaactgccggaaatcgtcgtggtattcactccagagggacgaaaacgtttcagtttgctcatggaaaacggtgtaacaagggtgaacactatcccagatcaccagctcaccgtctttcatggccatacgaaactccgggtgagcgttcatcaggcgggcaagaatgtgaataaaggccggataaaacttgtgcttatttttctttacggtctttaaaaaggccgtaatatccagctgaacggtctggttataggtacattgagcaactgactgaaatgcctcaaaatgttctttacgatgccattgggatatatcaacggtggtatatcccgtgatttttttctccatactcttcctttttcaatattattgaagcatttatcagggttattgtctcatgagcggatacatatttgaatgtatttagaaaaataaacaaataggggttccgcg

SEQ ID NO: 585 - DNA, 5914 bp, Artificial Sequence
  Synthetic
cacatttccccgaaaagtgccacctgacgtctaagaaaccattattatcatgacattaacctataaaaataggcgtatcacgaggcagaatttcagataaaaaaaatccttagctttcgctaaggatgatttctggaattcgcggccgcttctagagggagaacgatcgttggctgaatcataaaaaatttatttgctttgtgagcggataacaattataatagattcaattgtgagcggataacaattagaacccaacaccaccagcaagcctaaggaggagaaatatgtcatattaccaccatcaccatcatcacgactatgatattcccacaagcgagaacttgtactttcaagggatgagcaaaggagaagaacttttcactggagttgtcccaattcttgttgaattagatggtgatgttaatgggcacaaattttctgtccgtggagagggtgaaggtgatgctacaaacggaaaactcacccttaaatttatttgcactactggaaaactacctgttccgtggccaacacttgtcactactctgacctatggtgttcaatgcttttcccgttatccggatcacatgaaacggcatgactttttcaagagtgccatgcccgaaggttatgtacaggaacgcactatatctttcaaagatgacgggacctacaagacgcgtgctgaagtcaagtttgaaggtgatacccttgttaatcgtatcgagttaaagggtattgattttaaagaagatggaaacattcttggacacaaactcgagtacaactttaactcacacaatgtatacatcacggcagacaaacaaaagaatggaatcaaagctaacttcaaaattcgccacaacgttgaagatggttccgttcaactagcagaccattatcaacaaaatactccaattggcgatggccctgtccttttaccagacaaccattacctgtcgacacaatctgtcctttcgaaagatcccaacgaaaagcgtgaccacatggtccttcttgagtttgtaactgctgctgggattacacatggcatggatgagctctacaaataattcagccaaaaaacttaagaccgccggtcttgtccactaccttgcagtaatgcggtggacaggatcggcggttttcttttctcttctcaaccaatggcggcgcgccatcgaatggcgcaaaacctttcgcggtatggcatgatagcgcccggaagagagtcaattcagggtggtgaatatgaaaccagtaacgttatacgatgtcgcagagtatgccggtgtctcttatcagaccgtttcccgcgtggtgaaccaggccagccacgtttctgcgaaaacgcgggaaaaagtggaagcggcgatggcggagctgaattacattcccaaccgcgtggcacaacaactggcgggcaaacagtcgttgcttattggcgttgccacctccagtctggccctgcacgcgccgtcgcaaattgtcgcggcgattaaatctcgcgccgatcaactgggtgccagcgtggtggtgtcgatggtagaacgaagcggcgtcgaagcctgtaaagcggcggtgcacaatcttctcgcgcaacgcgtcagtgggctgatcattaactatccgctggatgaccaggatgccattgctgtggaagctgcctgcactaatgttccggcgttatttcttgatgtctctgaccagacacccatcaacagtattattttctcccatgaggacggtacgcgactgggcgtggagcatctggtcgcattgggtcaccagcaaatcgcgctgttagcgggcccattaagttctgtctcggcgcgtctgcgtctggctggctggcataaatatctcactcgcaatcaaattcagccgatagcggaacgggaaggcgactggagtgccatgtccggttttcaacaaaccatgcaaatgctgaatgagggcatcgttcccactgcgatgctggttgccaacgatcagatggcgctgggcgcaatgcgcgccattaccgagtccgggctgcgcgttggtgcggatatctcggtagtgggatacgacgataccgaagatagctcatgttatatcccgccgttaaccaccatcaaacaggattttcgcctgctggggcaaaccagcgtggaccgcttgctgcaactctctcagggccaggcggtgaagggcaatcagctgttgccagtctcactggtgaaaagaaaaaccaccctggcgcccaatacgcaaaccgcctctccccgcgcgttggccgattcattaatgcagctggcacgacaggtttcccgactggaaagcgggcagtgataattggtaacgaatcagacaattgacggctcgagggagtagcatagggtttgcagaatccctgcttcgtccatttgacaggcacattatgcatcgatgataagctgtcaaacatgagcacgcttactagtagcggccgctgcagtccggcaaaaaagggcaaggtgtcaccaccctgccctttttctttaaaaccgaaaagattacttcgcgttatgcaggcttcctcgctcactgactcgctgcgctcggtcgttcggctgcggcgagcggtatcagctcactcaaaggcggtaatgacagtaagacgggtaagcctgttgatgataccgctgccttactgggtgcattagccagtctgaatgacctgtcacgggataatccgaagtggtcagactggaaaatcagagggcaggaactgctgaacagcaaaaagtcagatagcaccacatagcagacccgccataaaacgccctgagaagcccgtgacgggcttttcttgtattatgggtagtttccttgcatgaatccataaaaggcgcctgtagtgccatttacccccattcactgccagagccgtgagcgcagcgaactgaatgtcacgaaaaagacagcgactcaggtgcctgatggtcggagacaaaaggaatattcagcgatttgcccgagcttgcgagggtgctacttaagcctttagggttttaaggtctgttttgtagaggagcaaacagcgtttgcgacatccttttgtaatactgcggaactgactaaagtagtgagttatacacagggctgggatctattctttttatctttttttattctttctttattctataaattataaccacttgaatataaacaaaaaaaacacacaaaggtctagcggaatttacagagggtctagcagaatttacaagttttccagcaaaggtctagcagaatttacagatacccacaactcaaaggaaaaggactagtaattatcattgactagcccatctcaattggtatagtgattaaaatcacctagaccaattgagatgtatgtctgaattagttgttttcaaagcaaatgaactagcgattagtcgctatgacttaacggagcatgaaaccaagctaattttatgctgtgtggcactactcaaccccacgattgaaaaccctacaaggaaagaacggacggtatcgttcacttataaccaatacgctcagatgatgaacatcagtagggaaaatgcttatggtgtattagctaaagcaaccagagagctgatgacgagaactgtggaaatcaggaatcctttggttaaaggcttttggattttccagtggacaaactatgccaagttctcaagcgaaaaattagaattagtttttagtgaagagatattgccttatcttttccagttaaaaaaattcataaaatataatctggaacatgttaagtcttttgaaaacaaatactctatgaggatttatgagtggttattaaaagaactaacacaaaagaaaactcacaaggcaaatatagagattagccttgatgaatttaagttcatgttaatgcttgaaaataactaccatgagtttaaaaggcttaaccaatgggttttgaaaccaataagtaaagatttaaacacttacagcaatatgaaattggtggttgataagcgaggccgcccgactgatacgttgattttccaagttgaactagatagacaaatggatctcgtaaccgaacttgagaacaaccagataaaaatgaatggtgacaaaataccaacaaccattacatcagattcctacctacataacggactaagaaaaacactacacgatgctttaactgcaaaaattcagctcaccagttttgaggcaaaatttttgagtgacatgcaaagtaagtatgatctcaatggttcgttctcatggctcacgcaaaaacaacgaaccacactagagaacatactggctaaatacggaaggatctgaggttcttatggctcttgtatctatcagtgaagcatcaagactaacaaacaaaagtagaacaactgttcaccgttacatatcaaagggaaaactgtccatatgcacagatgaaaacggtgtaaaaaagatagatacatcagagcttttacgagtttttggtgcattcaaagctgttcaccatgaacagatcgacaatgtaacagatgaacagcatgtaacacctaatagaacaggtgaaaccagtaaaacaaagcaactagaacatgaaattgaacacctgagacaacttgttacagctcaacagtcacacatagacagcctgaaacaggcgatgctgcttatcgaatcaaagctgccgacaacacgggagccagtgacgcctcccgtggggaaaaaatcatggcaattctggaagaaatagcgctttcagccggcaaaccggctgaagccggatctgcgattctgataacaaactagcaacaccagaacagcccgtttgcgggcagcaaaacccgtaccgattatcaaaaaggatcttcacctagatccttttaaattaaaaatgaagttttaaatcaatctaaagtatatatgagtaaacttggtctgacagttaccaatgcttaatcagtgaggcacctatctcagcgatctgtctatttcgttcatccatagttgcctgactccccgtcgtgtagataactacgatacgggagggcttaccatctggccccagtgctgcaatgataccgcgagaaccacgctcaccggctccagatttatcagcaataaaccagccagccggaagggccgagcgcagaagtggtcctgcaactttatccgcctccatccagtctattaattgttgccgggaagctagagtaagtagttcgccagttaatagtttgcgcaacgttgttgccattgctacaggcatcgtggtgtcacgctcgtcgtttggtatggcttcattcagctccggttcccaacgatcaaggcgagttacatgatcccccatgttgtgcaaaaaagcggttagctccttcggtcctccgatcgttgtcagaagtaagttggccgcagtgttatcactcatggttatggcagcactgcataattctcttactgtcatgccatccgtaagatgcttttctgtgactggtgagtactcaaccaagtcattctgagaatagtgtatgcggcgaccgagttgctcttgcccggcgtcaatacgggataataccgcgccacatagcagaactttaaaagtgctcatcattggaaaacgttcttcggggcgaaaactctcaaggatcttaccgctgttgagatccagttcgatataacccactcgtgcacccaactgatcttcagcatcttttactttcaccagcgtttctgggtgagcaaaaacaggaaggcaaaatgccgcaaaaaagggaataagggcgacacggaaatgttgaatactcatactcttcctttttcaatattattgaagcatttatcagggttattgtctcatgagcggatacatatttgaatgtatttagaaaaataaacaaataggggttccgcg

SEQ ID NO: 586 - DNA, 156 bp, Artificial Sequence
  Synthetic
atggcatatcccaacgatcaacaaggtaaagcacttcctttctttgctcgtttcttgtccgtaagcaaagaggaatcttccatcaagtctccttcccctgagcctacctacgggggcacctttaaatacccttctgactgggaagattattaataa

SEQ ID NO: 587 - DNA, 138 bp, Artificial Sequence
  Synthetic
atgggtccggttgttgtgttcgattgcatgacggccgactttctgaacgacgatccaaataacgcggagttgtctgccttggaaatggaggagctcgagtcctggggcgcctgggacggagaggctaccagctagtaa

SEQ ID NO: 588 - DNA, 96 bp, Artificial Sequence
  Synthetic
atgagtaaggaattagaaaaagttcttgaatccagttcaatggcaaagggggacggctggaaggttatggctaaaggtgacggttgggagtaataa

SEQ ID NO: 589 - DNA, 75 bp, Artificial Sequence
  Synthetic
atgtggaagaaacctgcttttatcgatttacgtctcggtctggaagtgacgctgtacatttctaaccgttaataa

SEQ ID NO: 590 - DNA, 132 bp, Artificial Sequence
  Synthetic
atgaaaaaagctgtcattgtagaaaacaaaggttgtgcaacatgctcgatcggagccgcttgtctagtggacggtcctatccctgattttgaaattgccggtgcaacaggtctattcggtctatggggataa

SEQ ID NO: 591 - DNA, 132 bp, Artificial Sequence
  Synthetic
atggataacaaggttgcgaagaatgtcgaagtgaagaagggctccatcaaggcgaccttcaaggctgctgttctgaagtcgaagacgaaggtcgacatcggaggtagccgtcagggctgcgtcgcttaataa

SEQ ID NO: 592 - DNA, 276 bp, Artificial Sequence
  Synthetic
atgtcagaagaacaactcaaggcattcattgccaaggttcaagcagacacttcactgcaggaacagctcaaagtagaaggtgctgatgttgttgctattgctaaagcctcagggttcgcgattaccacagaggacttaaaagcacatcaagccaactcacaaaagaacctgtctgatgctgagctggaaggtgtggctgggcgaaccattgggggaaccattgtgtcgataacctgtgagacttgcgatctgcttgtggggaaaatgtgctgataa

SEQ ID NO: 593 - DNA, 153 bp, Artificial Sequence
  Synthetic
atggacctgaatgatctgccgatggatgtttttgaactggcagatagcggtgttgcagttgaaagcctgaccgcaggtcatggtatgaccgaagttggtgcaagctgtaattgcttttgttatatttgttgtagctgcagcagcgcctaataa

SEQ ID NO: 594 - DNA, 120 bp, Artificial Sequence
  Synthetic
atggagcgcgaaatcgtgtggacagaaattgaggagtcggatttagccgccgtcgtgtcggcatctaatgtcaaggatggtccaaccgttagctcaagtaatgtaaaggaccgctaataa

SEQ ID NO: 595 - DNA, 6211 bp, Artificial Sequence
  Synthetic
cacatttccccgaaaagtgccacctgacgtctaagaaaccattattatcatgacattaacctataaaaataggcgtatcacgaggcagaatttcagataaaaaaaatccttagctttcgctaaggatgatttctggaattcgcggccgcttctagagggagaacgatcgttggctgaatcataaaaaatttatttgctttgtgagcggataacaattataatagattcaattgtgagcggataacaattagaacccaacaccaccagcaagcctaaggaggagaaatatgtcatattaccaccatcaccatcatcacgggtccctgcaggactcagaagtcaatcaagaagctaagccagaggtcaagccagaagtcaagcctgagactcacatcaatttaaaggtgtccgatggatcttcagagatcttcttcaagatcaaaaagaccactcctttaagaaggctgatggaagcgttcgctaaaagacagggtaaggaaatggactccttaagattcttgtacgacggtattagaattcaagctgatcaggcccctgaagatttggacatggaggataacgatattattgaggctcaccgcgaacagattggaggtcatcaccatcaccaccatggatatgatattagcacaggtatgagcaaaggagaagaacttttcactggagttgtcccaattcttgttgaattagatggtgatgttaatgggcacaaattttctgtccgtggagagggtgaaggtgatgctacaaacggaaaactcacccttaaatttatttgcactactggaaaactacctgttccgtggccaacacttgtcactactctgacctatggtgttcaatgcttttcccgttatccggatcacatgaaacggcatgactttttcaagagtgccatgcccgaaggttatgtacaggaacgcactatatctttcaaagatgacgggacctacaagacgcgtgctgaagtcaagtttgaaggtgatacccttgttaatcgtatcgagttaaagggtattgattttaaagaagatggaaacattcttggacacaaactcgagtacaactttaactcacacaatgtatacatcacggcagacaaacaaaagaatggaatcaaagctaacttcaaaattcgccacaacgttgaagatggttccgttcaactagcagaccattatcaacaaaatactccaattggcgatggccctgtccttttaccagacaaccattacctgtcgacacaatctgtcctttcgaaagatcccaacgaaaagcgtgaccacatggtccttcttgagtttgtaactgctgctgggattacacatggcatggatgagctctacaaataattcagccaaaaaacttaagaccgccggtcttgtccactaccttgcagtaatgcggtggacaggatcggcggttttcttttctcttctcaaccaatggcggcgcgccatcgaatggcgcaaaacctttcgcggtatggcatgatagcgcccggaagagagtcaattcagggtggtgaatatgaaaccagtaacgttatacgatgtcgcagagtatgccggtgtctcttatcagaccgtttcccgcgtggtgaaccaggccagccacgtttctgcgaaaacgcgggaaaaagtggaagcggcgatggcggagctgaattacattcccaaccgcgtggcacaacaactggcgggcaaacagtcgttgcttattggcgttgccacctccagtctggccctgcacgcgccgtcgcaaattgtcgcggcgattaaatctcgcgccgatcaactgggtgccagcgtggtggtgtcgatggtagaacgaagcggcgtcgaagcctgtaaagcggcggtgcacaatcttctcgcgcaacgcgtcagtgggctgatcattaactatccgctggatgaccaggatgccattgctgtggaagctgcctgcactaatgttccggcgttatttcttgatgtctctgaccagacacccatcaacagtattattttctcccatgaggacggtacgcgactgggcgtggagcatctggtcgcattgggtcaccagcaaatcgcgctgttagcgggcccattaagttctgtctcggcgcgtctgcgtctggctggctggcataaatatctcactcgcaatcaaattcagccgatagcggaacgggaaggcgactggagtgccatgtccggttttcaacaaaccatgcaaatgctgaatgagggcatcgttcccactgcgatgctggttgccaacgatcagatggcgctgggcgcaatgcgcgccattaccgagtccgggctgcgcgttggtgcggatatctcggtagtgggatacgacgataccgaagatagctcatgttatatcccgccgttaaccaccatcaaacaggattttcgcctgctggggcaaaccagcgtggaccgcttgctgcaactctctcagggccaggcggtgaagggcaatcagctgttgccagtctcactggtgaaaagaaaaaccaccctggcgcccaatacgcaaaccgcctctccccgcgcgttggccgattcattaatgcagctggcacgacaggtttcccgactggaaagcgggcagtgataattggtaacgaatcagacaattgacggctcgagggagtagcatagggtttgcagaatccctgcttcgtccatttgacaggcacattatgcatcgatgataagctgtcaaacatgagcacgcttactagtagcggccgctgcagtccggcaaaaaagggcaaggtgtcaccaccctgccctttttctttaaaaccgaaaagattacttcgcgttatgcaggcttcctcgctcactgactcgctgcgctcggtcgttcggctgcggcgagcggtatcagctcactcaaaggcggtaatgacagtaagacgggtaagcctgttgatgataccgctgccttactgggtgcattagccagtctgaatgacctgtcacgggataatccgaagtggtcagactggaaaatcagagggcaggaactgctgaacagcaaaaagtcagatagcaccacatagcagacccgccataaaacgccctgagaagcccgtgacgggcttttcttgtattatgggtagtttccttgcatgaatccataaaaggcgcctgtagtgccatttacccccattcactgccagagccgtgagcgcagcgaactgaatgtcacgaaaaagacagcgactcaggtgcctgatggtcggagacaaaaggaatattcagcgatttgcccgagcttgcgagggtgctacttaagcctttagggttttaaggtctgttttgtagaggagcaaacagcgtttgcgacatccttttgtaatactgcggaactgactaaagtagtgagttatacacagggctgggatctattctttttatctttttttattctttctttattctataaattataaccacttgaatataaacaaaaaaaacacacaaaggtctagcggaatttacagagggtctagcagaatttacaagttttccagcaaaggtctagcagaatttacagatacccacaactcaaaggaaaaggactagtaattatcattgactagcccatctcaattggtatagtgattaaaatcacctagaccaattgagatgtatgtctgaattagttgttttcaaagcaaatgaactagcgattagtcgctatgacttaacggagcatgaaaccaagctaattttatgctgtgtggcactactcaaccccacgattgaaaaccctacaaggaaagaacggacggtatcgttcacttataaccaatacgctcagatgatgaacatcagtagggaaaatgcttatggtgtattagctaaagcaaccagagagctgatgacgagaactgtggaaatcaggaatcctttggttaaaggcttttggattttccagtggacaaactatgccaagttctcaagcgaaaaattagaattagtttttagtgaagagatattgccttatcttttccagttaaaaaaattcataaaatataatctggaacatgttaagtcttttgaaaacaaatactctatgaggatttatgagtggttattaaaagaactaacacaaaagaaaactcacaaggcaaatatagagattagccttgatgaatttaagttcatgttaatgcttgaaaataactaccatgagtttaaaaggcttaaccaatgggttttgaaaccaataagtaaagatttaaacacttacagcaatatgaaattggtggttgataagcgaggccgcccgactgatacgttgattttccaagttgaactagatagacaaatggatctcgtaaccgaacttgagaacaaccagataaaaatgaatggtgacaaaataccaacaaccattacatcagattcctacctacataacggactaagaaaaacactacacgatgctttaactgcaaaaattcagctcaccagttttgaggcaaaatttttgagtgacatgcaaagtaagtatgatctcaatggttcgttctcatggctcacgcaaaaacaacgaaccacactagagaacatactggctaaatacggaaggatctgaggttcttatggctcttgtatctatcagtgaagcatcaagactaacaaacaaaagtagaacaactgttcaccgttacatatcaaagggaaaactgtccatatgcacagatgaaaacggtgtaaaaaagatagatacatcagagcttttacgagtttttggtgcattcaaagctgttcaccatgaacagatcgacaatgtaacagatgaacagcatgtaacacctaatagaacaggtgaaaccagtaaaacaaagcaactagaacatgaaattgaacacctgagacaacttgttacagctcaacagtcacacatagacagcctgaaacaggcgatgctgcttatcgaatcaaagctgccgacaacacgggagccagtgacgcctcccgtggggaaaaaatcatggcaattctggaagaaatagcgctttcagccggcaaaccggctgaagccggatctgcgattctgataacaaactagcaacaccagaacagcccgtttgcgggcagcaaaacccgtaccgattatcaaaaaggatcttcacctagatccttttaaattaaaaatgaagttttaaatcaatctaaagtatatatgagtaaacttggtctgacagttaccaatgcttaatcagtgaggcacctatctcagcgatctgtctatttcgttcatccatagttgcctgactccccgtcgtgtagataactacgatacgggagggcttaccatctggccccagtgctgcaatgataccgcgagaaccacgctcaccggctccagatttatcagcaataaaccagccagccggaagggccgagcgcagaagtggtcctgcaactttatccgcctccatccagtctattaattgttgccgggaagctagagtaagtagttcgccagttaatagtttgcgcaacgttgttgccattgctacaggcatcgtggtgtcacgctcgtcgtttggtatggcttcattcagctccggttcccaacgatcaaggcgagttacatgatcccccatgttgtgcaaaaaagcggttagctccttcggtcctccgatcgttgtcagaagtaagttggccgcagtgttatcactcatggttatggcagcactgcataattctcttactgtcatgccatccgtaagatgcttttctgtgactggtgagtactcaaccaagtcattctgagaatagtgtatgcggcgaccgagttgctcttgcccggcgtcaatacgggataataccgcgccacatagcagaactttaaaagtgctcatcattggaaaacgttcttcggggcgaaaactctcaaggatcttaccgctgttgagatccagttcgatataacccactcgtgcacccaactgatcttcagcatcttttactttcaccagcgtttctgggtgagcaaaaacaggaaggcaaaatgccgcaaaaaagggaataagggcgacacggaaatgttgaatactcatactcttcctttttcaatattattgaagcatttatcagggttattgtctcatgagcggatacatatttgaatgtatttagaaaaataaacaaataggggttccgcg

SEQ ID NO: 596 - DNA, 162 bp, Artificial Sequence
  Synthetic
atgaacaagaagaacattttaccgcagttaggacaaccagtcatccgccttactgccggtcaactgtcaagccaactggcggagctttctgaggaggctctgggaggggtcgatgcctcgtacgcggtgttctggccgatctgtagctatgacgactaataa

SEQ ID NO: 597 - DNA, 156 bp, Artificial Sequence; identical to SEQ ID NO: 586
  Synthetic

SEQ ID NO: 598 - DNA, 132 bp, Artificial Sequence; identical to SEQ ID NO: 590
  Synthetic

SEQ ID NO: 599 - DNA, 75 bp, Artificial Sequence; identical to SEQ ID NO: 589
  Synthetic

SEQ ID NO: 600 - DNA, 96 bp, Artificial Sequence; identical to SEQ ID NO: 588
  Synthetic

SEQ ID NO: 601 - DNA, 138 bp, Artificial Sequence; identical to SEQ ID NO: 587
  Synthetic

SEQ ID NO: 602 - DNA, 132 bp, Artificial Sequence; identical to SEQ ID NO: 591
  Synthetic

SEQ ID NO: 603 - DNA, 276 bp, Artificial Sequence; identical to SEQ ID NO: 592
  Synthetic

SEQ ID NO: 604 - DNA, 153 bp, Artificial Sequence; identical to SEQ ID NO: 593
  Synthetic

SEQ ID NO: 605 - DNA, 120 bp, Artificial Sequence; identical to SEQ ID NO: 594
  Synthetic

SEQ ID NO: 606 - DNA, 6229 bp, Artificial Sequence; identical to SEQ ID NO: 243
  Synthetic

SEQ ID NO: 607 - DNA, 129 bp, Artificial Sequence
  Synthetic
atggcacttcctttctttgctcgtttcttgtccgtaagcaaagaggaatcttccatcaagtctccttcccctgagcctacctacgggggcacctttaaatacccttctgactgggaagattattaataa

SEQ ID NO: 608 - DNA, 246 bp, Artificial Sequence
  Synthetic
atgtcagaagaacaactcaaggcattcattgccaaggttcaagcagacacttcactgcaggaacagctcaaagtagaaggtgctgatgttgttgctattgctaaagcctcagggttcgcgattaccacagaggacctcaattcgcatcgccaaaatctgtctgatgatgagctggagggagtcgcgggaggctttttctgcgtacagggtacggccaaccgtttcactatcaacgtttgctgataa

SEQ ID NO: 609 - DNA, 96 bp, Artificial Sequence; identical to SEQ ID NO: 235
  Synthetic

SEQ ID NO: 610 - DNA, 132 bp, Artificial Sequence; identical to SEQ ID NO: 590
  Synthetic

SEQ ID NO: 611 - DNA, 6249 bp, Artificial Sequence; identical to SEQ ID NO: 244
  Synthetic

SEQ ID NO: 612 - DNA, 129 bp, Artificial Sequence
  Synthetic
agcaagaaagaatggcaagagcccacgatcgaagtgctcgatattaatcagactatggcgggtaagggctggaaacagatagactgggtgagcgaccatgatgctgacttacacaatccgtcttaataa

SEQ ID NO: 613 - DNA, 60 bp, Artificial Sequence
  Synthetic
ctgaaaatccgcaaggtgaaaattgtcagagcgcagaacggccactacacgaactaataa

SEQ ID NO: 614 - DNA, 159 bp, Artificial Sequence; identical to SEQ ID NO: 233
  Synthetic

SEQ ID NO: 615 - DNA, 231 bp, Artificial Sequence
  Synthetic
acgaacttgctgaaagaatggaaaatgcccctggaacgtacgcataataactccaacccggcgggagacatttttcaggaactggaagatcaagacatactcgccggtgtgaatggagcagaaaacttatactttcagggttgtgcgtggtataacattagctgccgtctgggcaacaaaggagcctactgcacccttacagttgagtgcatgccctcctgtaactgataa

SEQ ID NO: 616 - DNA, 201 bp, Artificial Sequence
  Synthetic
gtgaattccaaagacctgagaaatccagaatttcgcaaagctcagggtctgcagtttgtagatgaagttaatgagaaggaactctcgagtttagccggcagcgagaatctttactttcaaggcacgacgtggccatgtgcgaccgtcggcgtttcagttgccttgtgcccgacgaccaaatgcacttcacagtgctgataa

SEQ ID NO: 617 - DNA, 162 bp, Artificial Sequence; identical to SEQ ID NO: 558
  Synthetic

SEQ ID NO: 618 - DNA, 213 bp, Artificial Sequence; identical to SEQ ID NO: 581
  Synthetic

SEQ ID NO: 619 - DNA, 231 bp, Artificial Sequence; identical to SEQ ID NO: 569
  Synthetic

SEQ ID NO: 620 - DNA, 177 bp, Artificial Sequence
  Synthetic
atgccagccgatattctggagactcgtaccagcgaaacggaggacttactggatcttgacctgagcatcggtgtagaagaaatcaccgcaggcccggcagtgacttcttggtcactgtgcacccctggatgcacgagtccgggcggtggctccaattgttcgttctgttgctaataa

SEQ ID NO: 621 - DNA, 312 bp, Artificial Sequence
  Synthetic
atgagcattgagaatgccaagagcttttatgaacgcgtcagtacagataagcagttccgcactcaactggaaaatacggccagtgctgaagaacggcagaaaatcattcaggcagcgggctttgagttcaccaatcaggagtgggaaattgcaaaagaacagattcttgcgacaagtgaaagtaataacggtgaactgtccgaggccgaactgaccgccgtcagcggtggggttgacttaagcattttcgagctgctggacgaagaacctttattcccgattcgtcctttgtacggcctgcctatttaataa

SEQ ID NO: 622 - DNA, 300 bp, Artificial Sequence; identical to SEQ ID NO: 238
  Synthetic

SEQ ID NO: 623 - DNA, 156 bp, Artificial Sequence
  Synthetic
atgaacctgaacgatttacctatggacgtctttgaaatggcagacagcggtatggaggtggaaagcctcacggctggccatggcatgccagaagttggagctagttgcaactgtgtgtgcgggttttgctgcagctgcagtccgagcgcgtaataa

SEQ ID NO: 624 - DNA, 183 bp, Artificial Sequence
  Synthetic
atgaataaaaacgaaatcgaaacccagccagttacgtggctggaggaagtttctgatcagaattttgatgaggatgtctttggtgcgtgtagcacaaacaccttctcgctgagcgattactggggtaacaacggtgcttggtgtacactcacgcacgaatgtatggcatggtgcaagtaataa

SEQ ID NO: 625 - DNA, 201 bp, Artificial Sequence
  Synthetic
atgaaggaaaagaatatgaagaaaaacgacaccatcgaacttcagcttggaaaatacctggaagatgatatgatcgaactggctgaaggggatgagtcccatgggggtactaccccggctacccctgcgatttctatcctcagcgcgtatatcagcaccaatacctgcccgacaactaagtgtacacgcgcgtgctaataa

SEQ ID NO: 626 - DNA, 225 bp, Artificial Sequence
  Synthetic
atgtccgaactgagtatggagaaagtggtcggcgaaacatttgaggatctgagcatcgcggaaatgacgatggtgcagggcagcggcgacattaacggcgaatttactacctcgccggcatgtgtttattccgttatggttgtatcgaaagcaagcagcgctaaatgtgcggccggtgcatcggcagtctcgggagccattctgagtgcgattcgttgctaataa

SEQ ID NO: 627 - DNA, 204 bp, Artificial Sequence
  Synthetic
atgagcgaatccaacatgaagaaggttgttggcgaaaccttcgaagatctgagcatcgcagaaatgacgaaagttcagggctcaggggacgtgatgccggaatctaccccaatttgtgccggcttcgcaaccttgatgagttctatcggtcttgttaaaaccatcaaaggcaatgtcaaaagtttctccgtcttaatttaataa

SEQ ID NO: 628 - DNA, 270 bp, Artificial Sequence
  Synthetic
atgaccaatgaagagatcattgtcgcgtggaaaaaccctaaagtccgtggcaaaaatatgccaagtcacccgagcggcgtgggattccaagagctttccatcaacgagatggcccaagtgaccggcggagcagtagaacagcgtgcaacaccaaccctggcaaccccgctgaccccgcataccccgtacgcaacctatgtggttagcggaggcgtggttagcgcgatttctggtatcttcagcaacaataaaacgtgtctgggctaataa

SEQ ID NO: 629 - DNA, 249 bp, Artificial Sequence
  Synthetic
atgaccaatgaggaaattatcgttgcgtggaaaaacccgaaggtgcgcggcaaaaacatgccttcccatccgtccggtgtgggcttccaggaattatctattaatgaaatggcacaggtgactggtggcgcggttgaacagcgcgcgacgccggcaaccccagcaacaccatggctgattaaagcgtcttatgtggtgagtggggcgggagtttcttttgtcgcaagctatatcactgtaaactaataa

SEQ ID NO: 630 - DNA, 237 bp, Artificial Sequence
  Synthetic
atgacggcgagtattcttcagtctgtcgttgatgcggactttcgtgcggccctgattgaaaacccagccgcattcggcgcgagcaccgcagttttgccgaccccagtcgaacagcaggatcaggcatcactggatttttggacaaaagatattgctgccactgaggcgtttgcttgcaaacagtcttgctcatttgggccgttcacctttgtgtgcgacgggaataccaaataataa

SEQ ID NO: 631 - DNA, 123 bp, Artificial Sequence; identical to SEQ ID NO: 234
  Synthetic

SEQ ID NO: 632 - DNA, 141 bp, Artificial Sequence
  Synthetic
atggattcactgctgtcaacagaaaccgtcattagtgatgacgaactgcttccgattgaagttggtggtaccgcggaattgacagaggggcagggcggcggtcagtccgaggataaacgtcgcgcttataactgctaataa

SEQ ID NO: 633 - DNA, 216 bp, Artificial Sequence
  Synthetic
atggaattaaaagcgagtgaatttggtgtagttttgtccgttgatgctcttaaattatcacgccagtctccattaggtgttggcattggtggtggtggcggcggcggcggcggcggcggtagctgcggtggtcaaggtggcggttgtggtggttgcagcaacggttgtagtggtggaaacggtggcagcggcggaagtggttcacatatctaataa

SEQ ID NO: 634 - DNA, 219 bp, Artificial Sequence
  Synthetic
atgagcaaaaatgagaacaacaagaaacagctgcgcgatcttttcattgaagatctgggcaaagttactggcggtaaaggtggcccgtataccaccttagccattggcgaagaagatccgattaccactttggctatcggagaagaggaccctgatccaacgacacttgccttaggtgaagaggacccaactacgcttgcaatcggcgaagaataataa

SEQ ID NO: 635 - DNA, 306 bp, Artificial Sequence
  Synthetic
atgccggaaaatcggcaggaagatctcaacgctcaggctgtaccattcttcgcgcgtttcttggagggtcaaaactgcgaggaccttactgatgaggaatcggaggcggttagcggtggaaaacgcggccaaacccgtaaatatccaagcgactgcgaagatgggaatggcgtgaccggtaaactgcgcgatgaagatattgcagtgaccttgaagtacccatccgacaatgaagataatggcggcggtgaaattgtgactctgaagtttccaagtgatgatgatgatcaaccagtaggctaataa

SEQ ID NO: 636 - DNA, 153 bp, Artificial Sequence
  Synthetic
atgttgaaacagatcaatgtgattgctggcgtaaaagagcctattcgcgcctatggttgttcggctaatgacgcatgctatttttgcgacacgcgtgacaactgcaaagcctgtgatgccagtgatttttgtatcaaaagtgatacgtaataa

SEQ ID NO: 637 - DNA, 438 bp, Artificial Sequence
  Synthetic
atgtcgagtaatatcctcgaaaaagttaaggagtttttcgtccggctggtgaaggatgatgcgtttcaaagccagctgcagaacaacagtattgatgaagttcgaaatatcctgcaggaggccgggtacatattcagcaaagaagaattcgaaaccgcaaccattgaattgctggatttgaaggaacgcgatgaattccacgagctgacagaagaggagcttgtcaccgctgttggcggtgttacgggcgggagtggtatatatggcccgattcaagctatgtacggtgccgtcgtaggtgatccaaaaccgggtaaggactgggggtggcgctttccgagcccgctgccaaaaccgagtccgattccgagtccgtggaaacccccggttgatgtccagcctatgtatggtgtggtagtgtcaaacgatagttaataa

SEQ ID NO: 638 - DNA, 129 bp, Artificial Sequence; identical to SEQ ID NO: 236
  Synthetic

SEQ ID NO: 639 - DNA, 129 bp, Artificial Sequence; identical to SEQ ID NO: 240
  Synthetic

SEQ ID NO: 640 - DNA, 114 bp, Artificial Sequence
  Synthetic
aagaaattctatgaagcgccagctctcatcgaacgtggcgcctttgcggctgctacagcggggtttggacgtctgctggcggatcagctggtgggacgcctgattccgtaataa

SEQ ID NO: 641 - DNA, 222 bp, Artificial Sequence
  Synthetic
actaaaggcctggacaaaatgcttttaaccaaaaagaagaaggatagtatgggtctgctgaacgaaatcgacgttaccaccctggatgaacagttaggcggtaaaatgagcaaagcatggtgccgatccatggtggtgtcctgcgtgtataacctggttgatttttcgtcgtcgagtgacgggaaaaagacatgtgctctgtaccgcaaatattgttaataa

SEQ ID NO: 642 - DNA, 186 bp, Artificial Sequence; identical to SEQ ID NO: 237
  Synthetic

SEQ ID NO: 643 - DNA, 183 bp, Artificial Sequence
  Synthetic
aaccactctaagaaaagtccggcaaaaggggcagcgtccctgcagcgtcctgctggggcaaaaggccgccctgaacctctggatcaacgcttgtggaaacacgtcggtggtggtgactacccacccccaggagccaacccaaagcatgatccaccaccccgcaatccgggccaccattaataa

SEQ ID NO: 644 - DNA, 168 bp, Artificial Sequence
  Synthetic
caagatctgattaattacttcctgaattatcctgaggctctgaagaaactcaagaataaggaagcctgcttaattgggtttgacgtccaggaaaccgaaacgattatcaaagcctataacgattactaccgcgctgatccgatcacgcgtcaatggggtgattaataa

SEQ ID NO: 645 - DNA, 264 bp, Artificial Sequence
  Synthetic
aagaacccgacgctgttgcccaaactgaccgcgccggtcgaacgtccggccgtaacttcgtcggatttaaagcaagcctcaagcgtcgatgctgcatggttaaatggcgataataactggtcaaccccattcgccggtgtgaacgcggcatggttaaatggggacaacaactggtccacgccttttgcgggcgtgaatgctgcatggcttaatggcgacaataactggagcactccatttgccgccgatggcgctgagtaataa

SEQ ID NO: 646 - DNA, 195 bp, Artificial Sequence; identical to SEQ ID NO: 239
  Synthetic

SEQ ID NO: 647 - DNA, 405 bp, Artificial Sequence
  Synthetic
tctggtcgcgggcgcgatcctgatgctgctgtacctcccttgcctcgtgtacctcgcactactaatcatgagccacgtacggcgtcccgagaaccaagagcagctccaagaactggacctacacgtccgccttcgtcgcgtccatctccgtgtggtcactctcctcaaacccctggtgcaggacgcagtggatgtcgtgtggagcgtcaaaaatcggctgcggcttcgtctgagaaggaaaagacaatggagaaccaagatttggagttattagcacgcctgcatgcacttcctgagactgaaccggtgggcgtcgacggattaccctatggcgagacttgtgagtgcgtcgggttacttacgttgttgaacaccgtatgtatcggcatttcatgcgcttaataa

SEQ ID NO: 648 - DNA, 195 bp, Artificial Sequence; identical to SEQ ID NO: 580
  Synthetic

SEQ ID NO: 649 - DNA, 6257 bp, Artificial Sequence
  Synthetic
cacatttccccgaaaagtgccacctgacgtctaagaaaccattattatcatgacattaacctataaaaataggcgtatcacgaggcagaatttcagataaaaaaaatccttagctttcgctaaggatgatttctggaattcgcggccgcttctagagggagaacgatcgttggctgaatcataaaaaatttatttgctttgtgagcggataacaattataatagattcaattgtgagcggataacaattcgaacccaacaccaccagcaagcctaaggaggagaaatatgtcatattaccaccatcaccatcatcacatgagcaaaggagaagaacttttcactggagttgtcccaattcttgttgaattagatggtgatgttaatgggcacaaattttctgtccgtggagagggtgaaggtgatgctacaaacggaaaactcacccttaaatttatttgcactactggaaaactacctgttccgtggccaacacttgtcactactctgacctatggtgttcaatgcttttcccgttatccggatcacatgaaacggcatgactttttcaagagtgccatgcccgaaggttatgtacaggaacgcactatatctttcaaagatgacgggacctacaagacgcgtgctgaagtcaagtttgaaggtgatacccttgttaatcgtatcgagttaaagggtattgattttaaagaagatggaaacattcttggacacaaactcgagtacaactttaactcacacaatgtatacatcacggcagacaaacaaaagaatggaatcaaagctaacttcaaaattcgccacaacgttgaagatggttccgttcaactagcagaccattatcaacaaaatactccaattggcgatggccctgtccttttaccagacaaccattacctgtcgacacaatctgtcctttcgaaagatcccaacgaaaagcgtgaccacatggtccttcttgagtttgtaactgctgctgggattacacatggcatggatgagctctacaaacgactggttccgcgtggtagctattacgactccattcccacaagcgagaacgactcagaagtcaatcaagaagctaagccagaggtcaagccagaagtcaagcctgagactcacatcaatttaaaggtgtccgatggatcttcagagatcttcttcaagatcaaaaagaccactcctttaagaaggctgatggaagcgttcgctaaaagacagggtaaggaaatggactccttaagattcttgtacgacggtattagaattcaagctgatcaggcccctgaagatttggacatggaggataacgatattattgaggctcaccgcgaacagattggaggctccattacaagccaccatcaccatcatcacggttaatactttcagccaaaaaacttaagaccgccggtcttgtccactaccttgcagtaatgcggtggacaggatcggcggttttcttttctcttctcaacaagtgagaccatgggcggcgcgccatcgaatggcgcaaaacctttcgcggtatggcatgatagcgcccggaagagagtcaattcagggtggtgaatatgaaaccagtaacgttatacgatgtcgcagagtatgccggtgtctcttatcagaccgtttcccgcgtggtgaaccaggccagccacgtttctgcgaaaacgcgggaaaaagtggaagcggcgatggcggagctgaattacattcccaaccgcgtggcacaacaactggcgggcaaacagtcgttgcttattggcgttgccacctccagtctggccctgcacgcgccgtcgcaaattgtcgcggcgattaaatctcgcgccgatcaactgggtgccagcgtggtggtgtcgatggtagaacgaagcggcgtcgaagcctgtaaagcggcggtgcacaatcttctcgcgcaacgcgtcagtgggctgatcattaactatccgctggatgaccaggatgccattgctgtggaagctgcctgcactaatgttccggcgttatttcttgatgtctctgaccagacacccatcaacagtattattttctcccatgaggacggtacgcgactgggcgtggagcatctggtcgcattgggtcaccagcaaatcgcgctgttagcgggcccattaagttctgtctcggcgcgtctgcgtctggctggctggcataaatatctcactcgcaatcaaattcagccgatagcggaacgggaaggcgactggagtgccatgtccggttttcaacaaaccatgcaaatgctgaatgagggcatcgttcccactgcgatgctggttgccaacgatcagatggcgctgggcgcaatgcgcgccattaccgagtccgggctgcgcgttggtgcggatatctcggtagtgggatacgacgataccgaagatagctcatgttatatcccgccgttaaccaccatcaaacaggattttcgcctgctggggcaaaccagcgtggaccgcttgctgcaactctctcagggccaggcggtgaagggcaatcagctgttgccagtctcactggtgaaaagaaaaaccaccctggcgcccaatacgcaaaccgcctctccccgcgcgttggccgattcattaatgcagctggcacgacaggtttcccgactggaaagcgggcagtgataattggtaacgaatcagacaattgacggctcgagggagtagcatagggtttgcagaatccctgcttcgtccatttgacaggcacattatgcatcgatgataagctgtcaaacatgagcacgcttactagtagcggccgctgcagtccggcaaaaaagggcaaggtgtcaccaccctgccctttttctttaaaaccgaaaagattacttcgcgttatgcaggcttcctcgctcactgactcgctgcgctcggtcgttcggctgcggcgagcggtatcagctcactcaaaggcggtaatgacagtaagacgggtaagcctgttgatgataccgctgccttactgggtgcattagccagtctgaatgacctgtcacgggataatccgaagtggtcagactggaaaatcagagggcaggaactgctgaacagcaaaaagtcagatagcaccacatagcagacccgccataaaacgccctgagaagcccgtgacgggcttttcttgtattatgggtagtttccttgcatgaatccataaaaggcgcctgtagtgccatttacccccattcactgccagagccgtgagcgcagcgaactgaatgtcacgaaaaagacagcgactcaggtgcctgatggtcggagacaaaaggaatattcagcgatttgcccgagcttgcgagggtgctacttaagcctttagggttttaaggtctgttttgtagaggagcaaacagcgtttgcgacatccttttgtaatactgcggaactgactaaagtagtgagttatacacagggctgggatctattctttttatctttttttattctttctttattctataaattataaccacttgaatataaacaaaaaaaacacacaaaggtctagcggaatttacagagggtctagcagaatttacaagttttccagcaaaggtctagcagaatttacagatacccacaactcaaaggaaaaggactagtaattatcattgactagcccatctcaattggtatagtgattaaaatcacctagaccaattgagatgtatgtctgaattagttgttttcaaagcaaatgaactagcgattagtcgctatgacttaacggagcatgaaaccaagctaattttatgctgtgtggcactactcaaccccacgattgaaaaccctacaaggaaagaacggacggtatcgttcacttataaccaatacgctcagatgatgaacatcagtagggaaaatgcttatggtgtattagctaaagcaaccagagagctgatgacgagaactgtggaaatcaggaatcctttggttaaaggcttttggattttccagtggacaaactatgccaagttctcaagcgaaaaattagaattagtttttagtgaagagatattgccttatcttttccagttaaaaaaattcataaaatataatctggaacatgttaagtcttttgaaaacaaatactctatgaggatttatgagtggttattaaaagaactaacacaaaagaaaactcacaaggcaaatatagagattagccttgatgaatttaagttcatgttaatgcttgaaaataactaccatgagtttaaaaggcttaaccaatgggttttgaaaccaataagtaaagatttaaacacttacagcaatatgaaattggtggttgataagcgaggccgcccgactgatacgttgattttccaagttgaactagatagacaaatggatctcgtaaccgaacttgagaacaaccagataaaaatgaatggtgacaaaataccaacaaccattacatcagattcctacctacataacggactaagaaaaacactacacgatgctttaactgcaaaaattcagctcaccagttttgaggcaaaatttttgagtgacatgcaaagtaagtatgatctcaatggttcgttctcatggctcacgcaaaaacaacgaaccacactagagaacatactggctaaatacggaaggatctgaggttcttatggctcttgtatctatcagtgaagcatcaagactaacaaacaaaagtagaacaactgttcaccgttacatatcaaagggaaaactgtccatatgcacagatgaaaacggtgtaaaaaagatagatacatcagagcttttacgagtttttggtgcattcaaagctgttcaccatgaacagatcgacaatgtaacagatgaacagcatgtaacacctaatagaacaggtgaaaccagtaaaacaaagcaactagaacatgaaattgaacacctgagacaacttgttacagctcaacagtcacacatagacagcctgaaacaggcgatgctgcttatcgaatcaaagctgccgacaacacgggagccagtgacgcctcccgtggggaaaaaatcatggcaattctggaagaaatagcgctttcagccggcaaaccggctgaagccggatctgcgattctgataacaaactagcaacaccagaacagcccgtttgcgggcagcaaaacccgtaccgattatcaaaaaggatcttcacctagatccttttaaattaaaaatgaagttttaaatcaatctaaagtatatatgagtaaacttggtctgacagttaccaatgcttaatcagtgaggcacctatctcagcgatctgtctatttcgttcatccatagttgcctgactccccgtcgtgtagataactacgatacgggagggcttaccatctggccccagtgctgcaatgataccgcgagaaccacgctcaccggctccagatttatcagcaataaaccagccagccggaagggccgagcgcagaagtggtcctgcaactttatccgcctccatccagtctattaattgttgccgggaagctagagtaagtagttcgccagttaatagtttgcgcaacgttgttgccattgctacaggcatcgtggtgtcacgctcgtcgtttggtatggcttcattcagctccggttcccaacgatcaaggcgagttacatgatcccccatgttgtgcaaaaaagcggttagctccttcggtcctccgatcgttgtcagaagtaagttggccgcagtgttatcactcatggttatggcagcactgcataattctcttactgtcatgccatccgtaagatgcttttctgtgactggtgagtactcaaccaagtcattctgagaatagtgtatgcggcgaccgagttgctcttgcccggcgtcaatacgggataataccgcgccacatagcagaactttaaaagtgctcatcattggaaaacgttcttcggggcgaaaactctcaaggatcttaccgctgttgagatccagttcgatataacccactcgtgcacccaactgatcttcagcatcttttactttcaccagcgtttctgggtgagcaaaaacaggaaggcaaaatgccgcaaaaaagggaataagggcgacacggaaatgttgaatactcatactcttcctttttcaatattattgaagcatttatcagggttattgtctcatgagcggatacatatttgaatgtatttagaaaaataaacaaataggggttccgcg

SEQ ID NO: 650 - DNA, 141 bp, Artificial Sequence; identical to SEQ ID NO: 527
  Synthetic

SEQ ID NO: 651 - DNA, 117 bp, Artificial Sequence; identical to SEQ ID NO: 546
  Synthetic

SEQ ID NO: 652 - DNA, 135 bp, Artificial Sequence; identical to SEQ ID NO: 520
  Synthetic

SEQ ID NO: 653 - DNA, 144 bp, Artificial Sequence; identical to SEQ ID NO: 522
  Synthetic

SEQ ID NO: 654 - DNA, 114 bp, Artificial Sequence; identical to SEQ ID NO: 529
  Synthetic

SEQ ID NO: 655 - DNA, 117 bp, Artificial Sequence; identical to SEQ ID NO: 530
  Synthetic

SEQ ID NO: 656 - DNA, 111 bp, Artificial Sequence; identical to SEQ ID NO: 531
  Synthetic

SEQ ID NO: 657 - DNA, 105 bp, Artificial Sequence; identical to SEQ ID NO: 532
  Synthetic

SEQ ID NO: 658 - DNA, 129 bp, Artificial Sequence; identical to SEQ ID NO: 533
  Synthetic

SEQ ID NO: 659 - DNA, 129 bp, Artificial Sequence; identical to SEQ ID NO: 534
  Synthetic

SEQ ID NO: 660 - DNA, 129 bp, Artificial Sequence; identical to SEQ ID NO: 535
  Synthetic

SEQ ID NO: 661 - DNA, 123 bp, Artificial Sequence; identical to SEQ ID NO: 539
  Synthetic

SEQ ID NO: 662 - DNA, 108 bp, Artificial Sequence; identical to SEQ ID NO: 540
  Synthetic

SEQ ID NO: 663 - DNA, 108 bp, Artificial Sequence; identical to SEQ ID NO: 541
  Synthetic

SEQ ID NO: 664 - DNA, 5673 bp, Artificial Sequence
  Synthetic
aacaccccttgtattactgtttatgtaagcagacagttttattgttcatgatgatatatttttatcttgtgcaatgtacatcagagattttgagacacaaccaattattgaaggcctccctaacggggggcctttttttgtttctggtctccacgacgcttaacgatcgttggctgacctgtaggatcgtacaggtttacgcaagaaaatggtttgttacagtcgaataaacagccccatagggtggtgtgtaccacccctgatgagtccaaaaggacgaaatggggcctctacaaataattttgtttaaagccacactcgaattactcaaaggacctctagcaatgcaaccaaccgccctccaaattaagccccacttccacgttgagataattgagccgaagcaagtgtatctcctgggcgaacagggcaaccacgctctcaccgggcagctctactgccaaattctgcctttcttaaacggcgaatacacccgagaacaaattgtggaaaagctcgatgggcaggtcccggaggaatatatcgacttcgtactcagtcgtctggtggagaagggctatctaactgaggtggctccagaactatccctggaagtggcagcattttggagcgaattgggaattgccccttctgtagtggcagaagggctaaagcagccagtgacagtgacaacggcgggcaagggcattagggaagggatagtggctaacctggcagcagcgctggaggaagctggcattcaggtgtcagacccaagggacccaaaggccccaaaggcaggggattctactgcccagcttcaggtggtgctgaccgatgactatttacagccggaacttgcagcgatcaacaaggaagccttagagcgccaacaaccctggttgctggttaagcctgtgggcagtatcctctggttgggaccgttgttcgttcctggggaaaccggatgttggcactgtcttgctcaacgattgcaaggcaaccgggaagttgaagcatcggtattgcaacaaaagcgagcgctgcaggagcgcaacggtcaaaataaaaatggtgcagtgagttgcttgcccacagcacgggcaaccctaccttctactctacaaacaggtttacagtgggctgccactgagattgctaagtggatggtcaagcggcacctcaatgccatagcaccgggaacggctcgttttcccactctagctggcaagatatttacattcaaccagacgactctggagttgaaagctcatcctctgagccgacgaccgcaatgtcccacctgtggcgatcgggaaactctccaacggcgcgggtttgaaccactgaagctagagtcgcgccccaaacacttcacctccgatggcggtcatcgcgccatgaccccagaacaaacggtgcagaagtaccaacacctcatcgggcccataacgggggtagtgacggaactggtgcgaatttctgaccctgccaatcccttggtgcatacctaccgggctgggcatagctttggcagtgctacgtctctgcgggggctgcgcaatgtcctacgccacaagagttctggtaaaggcaagaccgatagccaatctcgggccagcggactttgcgaggcgatcgagcgctattcgggcatttttcagggagacgaaccccgcaagcgggcaactttggctgagttgggagatttggcgattcatccagaacagtgtttgcactttagcgacaggcagtatgacaaccgggaaagctcgaacgagcgagcaacagtgactcacgactggattccccaacggttcgatgcaagtaaggctcacgactggactcccgtgtggtccctaacggagcaaacccataagtatctgcctacagccctgtgctattaccgataccccttccccccagaacaccgtttctgccgtagtgactccaacggaaacgcggcgggaaataccctggaagaggcgattttgcaaggatttatggaactggtggaacgggatagcgtgtgcctgtggtggtacaatcgcgttagccgtccggctgtggatttgagtagctttgacgagccttattttttgcagttgcagcagttctatcaaactcaaaatcgcgatctgtgggtactggatttaacagcagatttgggcattccggcttttgtaggggtatcgaatcggaaagccggcagctcggaaagaataattctcggctttggagcgcacctggacccgacagttgccatccttcgcgctcttacggaggtcaaccaaataggcttggaattggataaagtttctgatgagagcctcaagaacgatgccacggattggttagtgaatgctacattggcagctagtccctatctcgttgccgatgctagccaacccctcaagactgcgaaggattatccccggcgttggagtgacgatatttacaccgatgtgatgacttgtgtagaaatagccaagcaagcaggtctagagactttggtactggatcagaccagacccgacataggtttaaatgtggttaaagtcattgtgccaggaatgcgtttttggtcgcgatttggctccggtcggctctatgacgtgccagtgaagttgggatggcgagagcaaccacttgctgaggcacaaatgaaccctacaccgatgccattttaataagatacgaatttatgtatagactcggtaccaaaaaaaaaaaaaaagacgctgaaaagcgtcttttttttttttggtcctactatccttaaacgcatatcgtggtacaggagaccgtccaatggcggcgcgccatcgaatggcgcaaaacctttcgcggtatggcatgatagcgcccggaagagagtcaattcagggtggtgaatatgaaaaacataaatgccgacgacacatacagaataattaataaaattaaagcttgtagaagcaataatgatattaatcaatgcttatctgatatgactaaaatggtacattgtgaatattatttactcgcgatcatttatcctcattctatggttaaatctgatatttcaatcctagataattaccctaaaaaatggaggcaatattatgatgacgctaatttaataaaatatgatcctatagtagattattctaactccaatcattcaccaattaattggaatatatttgaaaacaatgctgtaaataaaaaatctccaaatgtaattaaagaagcgaaaacatcaggtcttatcactgggtttagtttccctattcatacggctaacaatggcttcggaatgcttagttttgcacattcagaaaaagacaactatatagatagtttatttttacatgcgtgtatgaacataccattaattgttccttctctagttgataattatcgaaaaataaatatagcaaataataaatcaaacaacgatttaaccaaaagagaaaaagaatgtttagcgtgggcatgcgaaggaaaaagctcttgggatatttcaaaaatattaggttgcagtgagcgtactgtcactttccatttaaccaatgcgcaaatgaaactcaatacaacaaaccgctgccaaagtatttctaaagcaattttaacaggagcaattgattgcccatactttaaaaattgataaggatcctaattggtaacgaatcagacaattgacggctcgagggagtagcatagggtttgcagaatccctgcttcgtccatttgacaggcacattatgcatcgatgataagctgtcaaacatgagcagatcctctacgccggacgcatcgtggccggcatcaccggcgccacaggtgcggttgctggcgcctatatcgccgacatcaccgatggggaagatcgggctcgccacttcgggctcatgagcaaatattttatctgaggtgcttcctcgctcactgactcgctgcacgaggcagacctcagcgctagcggagtgtatactggcttactatgttggcactgatgagggtgtcagtgaagtgcttcatgtggcaggagaaaaaaggctgcaccggtgcgtcagcagaatatgtgatacaggatatattccgcttcctcgctcactgactcgctacgctcggtcgttcgactgcggcgagcggaaatggcttacgaacggggcggagatttcctggaagatgccaggaagatacttaacagggaagtgagagggccgcggcaaagccgtttttccataggctccgcccccctgacaagcatcacgaaatctgacgctcaaatcagtggtggcgaaacccgacaggactataaagataccaggcgtttcccctggcggctccctcgtgcgctctcctgttcctgcctttcggtttaccggtgtcattccgctgttatggccgcgtttgtctcattccacgcctgacactcagttccgggtaggcagttcgctccaagctggactgtatgcacgaaccccccgttcagtccgaccgctgcgccttatccggtaactatcgtcttgagtccaacccggaaagacatgcaaaagcaccactggcagcagccactggtaattgatttagaggagttagtcttgaagtcatgcgccggttaaggctaaactgaaaggacaagttttggtgactgcgctcctccaagccagttacctcggttcaaagagttggtagctcagagaaccttcgaaaaaccgccctgcaaggcggttttttcgttttcagagcaagagattacgcgcagaccaaaacgatctcaagaagatcatcttattaaggggtctgacgctcagtggaacgaaaaatcaatctaaagtatatatgagtaaacttggtctgacagttaccttagaaaaactcatcgagcatcaaatgaaactgcaatttattcatatcaggattatcaataccatatttttgaaaaagccgtttctgtaatgaaggagaaaactcaccgaggcagttccataggatggcaagatcctggtatcggtctgcgattccgactcgtccaacatcaatacaacctattaatttcccctcgtcaaaaataaggttatcaagtgagaaatcaccatgagtgacgactgaatccggtgagaatggcaaaagcttatgcatttctttccagacttgttcaacaggccagccattacgctcgtcatcaaaatcactcgcatcaaccaaaccgttattcattcgtgattgcgcctgagcgagacgaaatacgcgatcgctgttaaaaggacaattacaaacaggaatcgaatgcaaccggcgcaggaacactgccagcgcatcaacaatattttcacctgaatcaggatattcttctaatacctggaatgctgttttcccggggatcgcagtggtgagtaaccatgcatcatcaggagtacggataaaatgcttgatggtcggaagaggcataaattccgtcagccagtttagtctgaccatctcatctgtaacatcattggcaacgctacctttgccatgtttcagaaacaactctggcgcatcgggcttcccatacaatcgatagattgtcgcacctgattgcccgacattatcgcgagcccatttatacccatataaatcagcatccatgttggaatttaatcgcggcctcgagcaagacgtttcccgttgaatatggctcat

SEQ ID NO: 665 - DNA, 3912 bp, Artificial Sequence
  Synthetic
aacaccccttgtattactgtttatgtaagcagacagttttattgttcatgatgatatatttttatcttgtgcaatgtacatcagagattttgagacacaaccaattattgaaggcctccctaacggggggcctttttttgtttctggtctcccaagcgcttaacgatcgttggctgaacaaacagacaatctggtctgtttgtattatggaaaatttttctgtataatagattcaacaaacagacaatctggtctgtttgtattatcagcggtcaacgcatgtgctttgcgttctgatgagacagtgatgtcgaaaccgcctctacaaataattttgtttatcacacaggaaagtactagatgagcaaaggagaagaacttttcactggagttgtcccaattcttgttgaattagatggtgatgttaatgggcacaaattttctgtccgtggagagggtgaaggtgatgctacaaacggaaaactcacccttaaatttatttgcactactggaaaactacctgttccgtggccaacacttgtcactactctgacctatggtgttcaatgcttttcccgttatccggatcacatgaaacggcatgactttttcaagagtgccatgcccgaaggttatgtacaggaacgcactatatctttcaaagatgacgggacctacaagacgcgtgctgaagtcaagtttgaaggtgatacccttgttaatcgtatcgagttaaagggtattgattttaaagaagatggaaacattcttggacacaaactcgagtacaactttaactcacacaatgtatacatcacggcagacaaacaaaagaatggaatcaaagctaacttcaaaattcgccacaacgttgaagatggttccgttcaactagcagaccattatcaacaaaatactccaattggcgatggccctgtccttttaccagacaaccattacctgtcgacacaatctgtcctttcgaaagatcccaacgaaaagcgtgaccacatggtccttcttgagtttgtaactgctgctgggattacacatggcatggatgagctctacaaataaggatgagctctacaaataagcagaggtggttgtgttgcgaaaaaaaaaaaaaaacaccctaacgggtgtttttttttttttggtgtccccacgtgtggcgctggagaccgtccaatggcggcgcgccatcgaatggtgcaaaacctttcgcggtatggcatgatagcgcccggaagagagtcaattcagggtggtgaatatgagcccgaaacgtcgtacccaggcagaacgtgcaatggaaacccagggtaaactgattgcagcagcactgggtgttctgcgtgaaaaaggttatgcaggttttcgtattgcagatgttccgggtgcagccggtgttagccgtggtgcacagagccatcattttccgaccaaactggaactgctgctggcaacctttgaatggctgtatgagcagattaccgaacgtagccgtgcacgtctggcaaaactgaaaccggaagatgatgttattcagcagatgctggatgatgcagcagatttttttctggatgatgattttagcatcggcctggatctgattgttgcagcagatcgtgatccggcactgcgtgaaggtattctgcgtaccgttgaacgtaatcgttttgttgttgaagatatgtggctgggtgtgctggtgagccgtggtctgagccgtgatgatgccgaagatattctgtggctgatttttaacagcgttcgtggtctgacagttcgtagcctgtggcagaaagataaagaacgttttgaacgtgtgcgtaatagcaccctggaaattgcacgtgaacgttatgcaaaattcaaacgttgataaggatcctaattggtaacgaatcagacaattgacggctcgagggagtagcatagggtttgcagaatccctgcttcgtccatttgacaggcacattatgcatcgatgataagctgtcaaacatgagcagatcctctacgccggacgcatcgtggccggcatcaccggcgccacaggtgcggttgctggcgcctatatcgccgacatcaccgatggggaagatcgggctcgccacttcgggctcatgagcaaatattttatctgaggtgcttcctcgctcactgactcgctgcacgaggcagacctcagcgctagcggagtgtatactggcttactatgttggcactgatgagggtgtcagtgaagtgcttcatgtggcaggagaaaaaaggctgcaccggtgcgtcagcagaatatgtgatacaggatatattccgcttcctcgctcactgactcgctacgctcggtcgttcgactgcggcgagcggaaatggcttacgaacggggcggagatttcctggaagatgccaggaagatacttaacagggaagtgagagggccgcggcaaagccgtttttccataggctccgcccccctgacaagcatcacgaaatctgacgctcaaatcagtggtggcgaaacccgacaggactataaagataccaggcgtttcccctggcggctccctcgtgcgctctcctgttcctgcctttcggtttaccggtgtcattccgctgttatggccgcgtttgtctcattccacgcctgacactcagttccgggtaggcagttcgctccaagctggactgtatgcacgaaccccccgttcagtccgaccgctgcgccttatccggtaactatcgtcttgagtccaacccggaaagacatgcaaaagcaccactggcagcagccactggtaattgatttagaggagttagtcttgaagtcatgcgccggttaaggctaaactgaaaggacaagttttggtgactgcgctcctccaagccagttacctcggttcaaagagttggtagctcagagaaccttcgaaaaaccgccctgcaaggcggttttttcgttttcagagcaagagattacgcgcagaccaaaacgatctcaagaagatcatcttattaaggggtctgacgctcagtggaacgaaaaatcaatctaaagtatatatgagtaaacttggtctgacagttaccttagaaaaactcatcgagcatcaaatgaaactgcaatttattcatatcaggattatcaataccatatttttgaaaaagccgtttctgtaatgaaggagaaaactcaccgaggcagttccataggatggcaagatcctggtatcggtctgcgattccgactcgtccaacatcaatacaacctattaatttcccctcgtcaaaaataaggttatcaagtgagaaatcaccatgagtgacgactgaatccggtgagaatggcaaaagcttatgcatttctttccagacttgttcaacaggccagccattacgctcgtcatcaaaatcactcgcatcaaccaaaccgttattcattcgtgattgcgcctgagcgagacgaaatacgcgatcgctgttaaaaggacaattacaaacaggaatcgaatgcaaccggcgcaggaacactgccagcgcatcaacaatattttcacctgaatcaggatattcttctaatacctggaatgctgttttcccggggatcgcagtggtgagtaaccatgcatcatcaggagtacggataaaatgcttgatggtcggaagaggcataaattccgtcagccagtttagtctgaccatctcatctgtaacatcattggcaacgctacctttgccatgtttcagaaacaactctggcgcatcgggcttcccatacaatcgatagattgtcgcacctgattgcccgacattatcgcgagcccatttatacccatataaatcagcatccatgttggaatttaatcgcggcctcgagcaagacgtttcccgttgaatatggctcat

SEQ ID NO: 666 - DNA, 3198 bp, Artificial Sequence
  Synthetic
ccaatcaaggaggtagaaaacataatgcgcgaactccaaaatgcgctttactttagcgaagtggtttttggaccgaatcttgagaagattgtaggagaaaagcgcctcaatttttggctcaaacttataggtgaggacccggaaaacctgaaggagtttctctcgagaaagggcaattctttcgaagaacaaaccttaccggaaaaggaagctatcgttccgaaccgcttaggtgaagaggcgctggaaaaagtccgcgaagaacttgagttcctcaatacttacagcactaaacatgtgcgtcgcgttaaagagttgggagtgcagatccctttcgaagggattctgctgccattcattagcatgtatatcgaaaaatttcagcagcagcaacttcgcaaaaagatagggccgattcacgaagagatctggacgcagattgttcaagatatcacctccaaattaaatgcgattctgcaccgtaccctgatcctggaactgaatgtagctcgtgttacctcccaacttaaaggtgatactccggaagaaagattcgcctactactcgaaaacctatttaggcaaacgtgaagtaactcaccgtctgtatagcgaatatccggtggttctgcggttgctgttcaccaccatttcacaccacatttcgttcattacggaaatccttgaacgcgttgcaaatgaccgtgaagccattgaaaccgaattttcaccgtgttccccgattggtaccctcgcctctctccacttaaactcgggagatgctcaccataaacagcgtactgtgacgattttggaattctcctcctcgctgaaacttgtctacaaacctcgctccctcaaagttgatggggtgttcaacggtttactcgctttcctgaacgatagaacgggggaagtcattaaggaccagtattgccctaaggtgttacagcgcgatggctacggctatgtggaatttgtcactcaccagtcttgtcaatcccttgaggaagtgtcagacttctacgagagactcggctctctgatgagtctgtcctacgtactgaatagttctgactttcatttcgagaacattatagctcatggtccctatcctgtcctgatcgatcttgaaaccatcattcataatacagcggatagcagcgaggaaacgtctaccgctatggatcgcgcgttccgtatgttgaacgattcggtgctgtccactggtatgcttccctcctctatttattatcgcgatcagccgaatatgaagggtctgaacgtcggaggtgtgagcaaatcagaaggtcagaaaacaccgttcaaagttaatcaaatcgccaatcgcaacaccgatgagatgcgtatcgaaaaagatcacgttaccctgagcagccagaaaaatctgcccatttttcagtctgccgcaatggagagcgtacatttcttagatcagatccagaaaggctttacctccatgtatcagtggatcgagaagaacaaacaagaatttaaagaacaggtgcgtaagtttgaaggtgtgccggttcgtgctgttcttcggagcacgactcgctataccgaactgctgaaatcttcctaccaccctgacctgctccgcagcgcgttggaccgtgaagtactgctgaaccgtttgactgttgactcggtaatgaccccgtatctcaaagagattattccactcgaggtggaagatctgctgaacggtgacgtgccatacttctacaccctgccggaagaacgcgccctgtatcaggaagcgtctgcgatcaatagtacgttctttaccacttcgattttccataagattgaccagaaaatcgataagctgggtatcgaggaccatacccagcaaatgaagatcttacacatgagtatgcttgcctctaacgctaaccattacgccgatgttgccgacttggatattcagaaaggacacaccattaaaaacgaacagtacgttgagatggccaaagacatcggtgattacctgatggagttatcggtcgagggtgaaaatcaaggggaaccagatctgtgttggatttcgaccgtcctggaagggagctctgaaatcatttgggacatcagcccagtgggcgaagatttatacaacggcagcgctggcgtcgctctcttttatgcgtacctgttcaaaattacaggtgaaaagcgttaccaagagatcgcatacaaagccctggttccggttcgccgcagtgtggcccaattccagcaccatccgaattggagcattggtgcgtttaacggagcgtcaggctatctgtacgcgatgggtacgatagcggccctgtttaatgatgaacgtttgaagcatgaagtaacccgcagcattccgcacattgaaccgatgatccacgaggataagatctatgatttcattggcggttccgcaggggcgctgaaggtgttcctgagcctgtcggggctgtttgacgagccgaagtttttggaacttgccattgcatgcagcgaacatctgatgaaaaacgccattaaaacggatcaaggtatcggctggaaaccaccgtgggaggtcaccccactgaccggtttcagccatggggttagcggcgtcatggcatccttcatcgaactgtaccagcaaaccggtgatgagcgcttgctcagttacattgatcagagtttagcctatgaacgttccttcttcagcgaacaagaggagaactggctgactccgaacaaagaaacacccgtggtagcttggtgccacggcgcgccgggaattttggtatcacgactgcttctgaagaaatgcggctatttggatgaaaaagtcgaaaaagaaattgaggtggcattatccacaactatccgtaaaggccttggtaacaatcgcagtctttgccatggtgatttcggccagctggaaattcttcgctttgcggcggaagtgttaggcgatagctatctccaggaagttgtcaacaatctgtccggcgagttgtataatcttttcaaaacggagggatatcagagcggaaccagccgcggtactgaatccgtgggcctgatggtaggtctgtccgggtttgggtatggtttactttcagcggcatatccatctgctgtcccctcaatcttaacattggatggtgagatccagaagtaccgggagcctcatgaagcctga

SEQ ID NO: 667 - DNA, 3000 bp, Artificial Sequence
  Synthetic
taaaaccgctcgtaaggaggtcttatgaaaacgccgctgacctcggaacatccttcagtgccgacgacgctgccgcatactaacgacaccgattggctcgagcaattacatgacattttgtccattcctgttacggaagaaatccagaaatatttccacgccgaaaatgatctgttctcgtttttctatacaccgttcctgcagtttacgtaccagagcatgtcggactactttatgaccttcaagaccgatatggccctgatcgaaagacagagcctcctgcaaagcacgctgaccgcggtacatcaccgactcttccacttaacgcatcgcacccttattagtgaaatgcatattgataaacttaccgttggcctgaatggctctacgccgcacgagcgctacatggatttcaaccacaaattcaacaaaacctcgaagtcgaagaacctgtttaacatctacccaattttgggaaaattggtcgttaacgaaactctgcgcactattaacttcgtcaagaaaatcattcagcactacatgaaggactacctgctcctgtcggacttcttcaaagagaaggacttgcgtcttaccaacctgcaattaggcgtgggggatacacacgttaatgggcaatgcgtcaccattctgacgtttgcatcaggccaaaaagtggtatacaaacctagatcattgtcgatagataaacagttcggagaattcatcgagtgggtaaactcgaaaggttttcagccttccttgcgtatccctattgcgattgatcgtcaaacctatggttggtatgaattcatccctcatcaagaggccaccagcgaagatgaaatagaacgctactattctcgcatcggtggttatctggcgatcgcctacttgttcggggcaaccgacctgcacctggataacctgatcgcctgcggcgaacatccgatgcttattgatttggaaacactctttaccaacgatctcgactgctatgacagtgcgtttccgttcccggcgctggcccgcgaattaacccaatccgtttttggcacccttatgcttcccatcaccatcgcgtcggggaaactgctggatatagacctgtcagcagtaggaggcggtaaaggtgtgcagtccgaaaagatcaaaacctgggtcatcgtgaatcagaaaactgatgagatgaagctggtcgagcagccgtatgttaccgagagttcccagaataaaccaacagttaatgggaaagaggcgaacattggcaattatattcctcatgtcacagatggctttcgtaaaatgtaccgcctgtttctgaatgaaattgatgagttaatggatcataacgggccaatctttgcgtttgagagttgtcagattcgtcatgtttttcgagctacccacgtgtatgcgaaatttttggaggcaagtacccacccagattacttgcaagaacctaccagacgtaataaactgttcgagtccttttggaacatcacgtcgctgatggcaccgttcaagaaaattgtaccgcacgaaatcgcggagttggagaaccatgatattccgtacttcgtcctgacttgtggcggcaccattgttaaagatggatacggccgggatatcgcagacctgtttcaaagtagctgcatcgaacgtgtaactcatcgtctgcagcagctgggaagcgaggatgaggcgcgtcaaattcgctacattaaaagcagcctggcgacgttgaccaacggtgattggaccccatcccatgagaaaaccccgatgtctccggcctcggccgaccgtgaagatggttacttcctgcgcgaggctcaggccatcggcgacgacattttggcgcagctgatttgggaggatgaccgtcacgccgcttaccttattggcgtaagcgtgggcatgaacgaagccgtcactgtgtcacccctgacgcctggcatctacgacggcacacttggcatagtgctgttcttcgatcagctggcccagcagaccggcgaaacccattatcgccacgccgccgacgctttactggaaggaatgttcaaacagctgaaacctgaactgatgccgtctagcgcttacttcggactgggtagcctgttctatggcctgatggtgttgggcctccagcgttccgactcgcatatcattcagaaagcgtatgagtatctgaaacatttggaagagtgtgtgcagcatgaggaaacgccagattttgtctcgggtttgtctggtgtactgtatatgctcacgaaaatttatcagctcacgaatgaaccgagagttttcgaagtggccaaaaccacagcttcgcgtctgtctgtgctgcttgacagcaagcagcccgacactgtgctcaccgggttatcccatggcgccgcaggattcgcccttgcattactgacctacggaaccgctgcaaatgatgaacagttgctgaaacagggccactcctatctggtgtacgaacgtaatcggtttaacaaacaggaaaacaactgggttgatttacgtaaaggcaacgcgtatcaaacattttggtgccatggcgccccgggtattggcatctcacgcctcctgttagcgcaattttacgatgacgaactgctgcatgaagagttaaacgcagcactgaacaagactatttcggacggcttcggccacaatcactcactgtgtcatggcgatttcggcaacctcgatctgttattgctttatgcccaatatacgaataacccagaaccaaaggaactcgctcgcaaactggccataagcagtatcgatcaagcgcacacgtatggctggaaactcgggctcaatcatagcgatcaactgcagggtatgatgttaggggtgactggtatcggctatcagctccttcgtcatataaatccgacagtccccagcattttggcactggaactgcccagctccacgttaactgaaaaagagctgagaatccatgatcgttgataa

SEQ ID NO: 668 - DNA, 3909 bp, Artificial Sequence; identical to SEQ ID NO: 245
  Synthetic

SEQ ID NO: 669 - DNA, 2383 bp, Artificial Sequence
  Synthetic
agacacactcgaattactcaaaggacctctagcaatgcaaccaaccgccctccaaattaagccccacttccacgttgagataattgagccgaagcaagtgtatctcctgggcgaacagggcaaccacgctctcaccgggcagctctactgccaaattctgcctttcttaaacggcgaatacacccgagaacaaattgtggaaaagctcgatgggcaggtcccggaggaatatatcgacttcgtactcagtcgtctggtggagaagggctatctaactgaggtggctccagaactatccctggaagtggcagcattttggagcgaattgggaattgccccttctgtagtggcagaagggctaaagcagccagtgacagtgacaacggcgggcaagggcattagggaagggatagtggctaacctggcagcagcgctggaggaagctggcattcaggtgtcagacccaagggacccaaaggccccaaaggcaggggattctactgcccagcttcaggtggtgctgaccgatgactatttacagccggaacttgcagcgatcaacaaggaagccttagagcgccaacaaccctggttgctggttaagcctgtgggcagtatcctctggttgggaccgttgttcgttcctggggaaaccggatgttggcactgtcttgctcaacgattgcaaggcaaccgggaagttgaagcatcggtattgcaacaaaagcgagcgctgcaggagcgcaacggtcaaaataaaaatggtgcagtgagttgcttgcccacagcacgggcaaccctaccttctactctacaaacaggtttacagtgggctgccactgagattgctaagtggatggtcaagcggcacctcaatgccatagcaccgggaacggctcgttttcccactctagctggcaagatatttacattcaaccagacgactctggagttgaaagctcatcctctgagccgacgaccgcaatgtcccacctgtggcgatcgggaaactctccaacggcgcgggtttgaaccactgaagctagagtcgcgccccaaacacttcacctccgatggcggtcatcgcgccatgaccccagaacaaacggtgcagaagtaccaacacctcatcgggcccataacgggggtagtgacggaactggtgcgaatttctgaccctgccaatcccttggtgcatacctaccgggctgggcatagctttggcagtgctacgtctctgcgggggctgcgcaatgtcctacgccacaagagttctggtaaaggcaagaccgatagccaatctcgggccagcggactttgcgaggcgatcgagcgctattcgggcatttttcagggagacgaaccccgcaagcgggcaactttggctgagttgggagatttggcgattcatccagaacagtgtttgcactttagcgacaggcagtatgacaaccgggaaagctcgaacgagcgagcaacagtgactcacgactggattccccaacggttcgatgcaagtaaggctcacgactggactcccgtgtggtccctaacggagcaaacccataagtatctgcctacagccctgtgctattaccgataccccttccccccagaacaccgtttctgccgtagtgactccaacggaaacgcggcgggaaataccctggaagaggcgattttgcaaggatttatggaactggtggaacgggatagcgtgtgcctgtggtggtacaatcgcgttagccgtccggctgtggatttgagtagctttgacgagccttattttttgcagttgcagcagttctatcaaactcaaaatcgcgatctgtgggtactggatttaacagcagatttgggcattccggcttttgtaggggtatcgaatcggaaagccggcagctcggaaagaataattctcggctttggagcgcacctggacccgacagttgccatccttcgcgctcttacggaggtcaaccaaataggcttggaattggataaagtttctgatgagagcctcaagaacgatgccacggattggttagtgaatgctacattggcagctagtccctatctcgttgccgatgctagccaacccctcaagactgcgaaggattatccccggcgttggagtgacgatatttacaccgatgtgatgacttgtgtagaaatagccaagcaagcaggtctagagactttggtactggatcagaccagacccgacataggtttaaatgtggttaaagtcattgtgccaggaatgcgtttttggtcgcgatttggctccggtcggctctatgacgtgccagtgaagttgggatggcgagagcaaccacttgctgaggcacaaatgaaccctacaccgatgccattttaataa

SEQ ID NO: 670 - DNA, 1381 bp, Artificial Sequence
  Synthetic
agaatcaagcaagtcaaaggagttaacccgaatgtttatagagcagatgtttccatttattaatgaaagtgtaagagttcaccagcttcctgagggcggcgtgttagaaatcgactacttgcgcgataatgtctccatttctgactttgagtatttggatctcaacaaaacggcttacgagctctgcatgcgcatggatggccaaaaaacagctgagcagattttagctgagcaatgtgcagtgtatgatgaatcaccggaagatcataaagattggtattacgacatgctcaacatgctccagaacaagcaggttattcagcttggaaaccgggccagccgccatacaatcaccacgagcggaagcaatgaatttccgatgcccctgcacgccacctttgaactgacgcaccgctgtaatttgaaatgcgcccactgttatttggaaagctcacctgaagcgctcggcaccgtgtcgattgagcaattcaaaaaaacggctgatatgctgtttgataacggtgtattgacatgcgaaatcacaggtggagaaatttttgtccatccaaacgccaatgagattcttgactatgtgtgtaaaaagttcaaaaaagtcgctgtcttaacaaacggaacactcatgcgaaaagagagcctggagcttttgaaaacttacaagcaaaaaatcatcgtcggcatttctctagatagtgtcaattccgaggtccatgactcctttagagggagaaaaggctcttttgcccaaacttgtaaaacgataaaattgttgagtgaccacggtatatttgtcagagtcgctatgtctgtattcgaaaaaaacatgtgggaaatccacgatatggcccaaaaggttcgggatctcggggcgaaggcgttttcttacaattgggttgacgatttcggaagaggcagggatattgtccatccaacgaaagacgccgagcagcaccgcaagtttatggaatacgagcaacatgtgattgatgagtttaaagatctgattccgattattccctatgagagaaaacgcgcggcaaattgcggcgctggctggaagtccattgtgatcagtccgttcggcgaagtacgtccttgcgccctctttccaaaggaattttcattgggaaatatttttcatgattcctatgaaagcatctttaactcccctctcgtccataaactgtggcaagcgcaagcgccgcggttcagcgaacattgcatgaaagacaaatgcccgttcagcggctattgcggaggctgttacttaaaagggctgaactctaacaaatatcaccggaaaaacatttgctcttgggcgaaaaatgaacaattagaagatgtggtccagcttatttagtaa

SEQ ID NO: 671 - DNA, 1013 bp, Artificial Sequence
  Synthetic
agacgcccgcaacattttattttaaggacgacccaatgaccgttttaattgttacttttagccacgataatgaaagtattcctctggtaatcaaagccatagaagccatgggtaaaaaagccttccgttttgatactgatcgcttccctacagaggtgaaagttgatctttactcaggcggtcaaaaaggcggaattattaccgatggagaacaaaaattagagctaaaagaagtttcttctgtctggtatcgacgcatgagatacggactaaaattacccgatgggatggatagtcaatttcgcgaagcttctcttaaggaatgtcggttaagtattcgaggaatgattgctagtttatctggctttcatcttgatccaattgctaaggtagatcatgctaatcataaacaattgcagttacaagtggcgcaacaattaggtttattaattccggggactttaacttctaataatcctgaagctgtcaagcaatttgctcgggagtttgaagcgacgggaattgtgactaaaatgctttctcaatttgctatttatggagacaagcaagaggaaatggttgtttttaccagtcctgttacaaaggaagatctagataatttggaaggtttgcaattttgtccaatgacttttcaggaaaacattcctaaagctttggaattacgcatcactatcgtcggtgaacaaatatttacggcggcgattaattcccaacaattagacggtgctatctacgattggcgaaaagagggacgcgcgctccatcaacaatggcaaccctacgatttaccgaaaactattgaaaaacaactactagaattagtgaaatatttcggtcttaattatggtgcaattgatatgattgtcacaccagatgaacgttatatctttttagaaattaatcccgttggcgagtttttctggctagaactttatcctccttattttcctatctcccaggcgatcgctgaaatcctagttaactcataataa

SEQ ID NO: 672 - DNA, 3244 bp, Artificial Sequence
  Synthetic
agaaatcacattacgcatagggggaggtagacacatggagagtcctagctcatggaaaacatcgtggctggccgccatcgctccggatgaaccccacaaattcgaccgccgcttagaatgggacgagctttcagaggagaacttcttcgcagcactgaactcagaacctgcatcgttggaagaggatgatccatgttttgaagaagcactgcaagacgccctggaggccttgaaggcagcatgggatttaccccttcttcccgtcgataataatcttaatcgtcccttcgtagatgtctggtggcccattcgctgtcactctgcggagagcttgcgtcaaagcttcgtcagtgatagtgctggacttgcggacgagatttttgatcagctggccgattcgttactggaccgtctgtgcgccctgggagatcaggtgttgtgggaggcgtttaacaaggagcgtacaccaggaacgatgttgttagcccacttaggagccgcaggcgacggctccggaccccctgtacgtgagcattacgaacgttttattcagtctcaccgccgtaatggattagcgcctttgcttaaggaattccctgtactgggccgccttattggaacagttttgtccctttggttccaagggagcgtggaaatgctgcaacgtatctgcgctgaccgcaccgttctgcaacagtgtttcgctatcccttgcgggcatcacctgaaaactgtaaagcagggactttctgatccacaccgcggcggtcgcgctgtggcagttttggaatttgcggacccaaattccaccgctaattcaagtatgcacgtagtgtataaaccgaaggatatggctgtggatgcagcttaccaggccaccttagcagatcttaatactcatagcgacctttccccgttgcgcacgcttgccattcataacggcaacggatatggttacatggaacatgtggttcaccatctttgcgctaacgacaaagagctgacaaatttctatttcaacgctgggcgtttaaccgcgcttctgcatcttcttggatgtactgactgtcaccatgaaaatttgattgcatgtggtgatcaattactgttgatcgatacagaaacattattggaggcggatttacccgatcacatttcggatgcttcgagcaccacggcgcaaccaaagcctagtagccttcaaaagcaatttcagcgttctgttttgcgtagcgggttacttcctcaatggatgttcctgggggagtcgaagttggccatcgacatctcggctctgggaatgtccccacccaataagcctgagcgtattgcacttggctggttaggattcaattctgacgggatgatgcctgggcgtgtatcccaaccagttgagattcctacatccttgcccgttgggattggtgaggttaatccctttgatcgttttttagaggatttttgtgatggcttttccatgcaatcagaggcccttattaagcttcgcaaccgttggctggacgttaatggggttcttgctcatttcgcgggtctgccccgccgtatcgttcttcgcgcgactcgcgtatacttcactatccagcgtcagcagttagagcctacggcactgcgctctccacttgcacaggccttgaaacttgagcagcttactcgttctttcttgttggcagagtcaaagcctcttcactggcccattttcgcagctgaagtaaagcagatgcagcaccttgacattcctttcttcacacacttaatcgacgctgacgctctgcagctgggcggcctggaacaagaattaccaggcttcatccagactagtggcttggcagctgcttacgagcgtttgcgtaatttagatacggacgagattgctttccaacttcgtctgatccgcggtgcagtagaggctcgcgagttgcatactacgccggagtcgagcccgacgttgccgccgcctgccacccccgaggctcttatgtcctcttcagccgagactagtttagaagctgctaagcgcatcgctcaccgcttactggagttggcaattcgtgattctcaagggcaagtagaatggctgggcatggatctgggggcagatggagagagcttctcctttggcccagttggcttgagcctttatgggggctcaatcggtatcgctcaccttctgcaacgtttgcaggcgcagcaagtttccttgatggacgcagacgctatccaaacggcaattttacagccccttgtgggactggttgatcaacctagcgacgacggacgtcgccgttggtggcgtgatcagccgctgggcttaagtggatgtggcggtaccttgcttgcacttacacttcaaggtgaacaagcgatggctaattccctgctggccgctgctttgccccgttttatcgaggctgatcagcaacttgacctgattggtggctgcgctggactgatcggttcgttggtacaattaggtactgaaagtgccttacaattagctttgcgtgcgggcgaccatcttattgcgcaacagaatgaagagggggcgtggtctagctcgtcatcacagcccggtttgttgggctttagtcatggtactgcaggttacgcagcagccttagcacacttacatgcattttccgctgatgagcgttaccgcaccgcagccgctgccgctttagcatacgaacgcgcacgttttaataaagatgccggcaactggccagactaccgctcgatcggacgtgactctgattcagatgaaccgtcctttatggcttcctggtgtcacggcgcacccggcattgccctgggccgcgcctgtttgtggggtacggcgctttgggacgaagaatgcaccaaggagatcggaattgggttacagaccacagctgctgtttcgtctgttagtactgaccacctgtgttgtggttcacttggccttatggtattattagagatgctgtcagcaggaccctggcccatcgacaatcaattacgttcccattgccaggacgtagcattccagtaccgcctgcaggctttgcagcgctgttcagccgagccgattaagcttcgttgcttcggtacaaaagagggccttttagtcctgcctggatttttcactggcttatcaggaatgggtttagcactgcttgaggatgatccatctcgcgccgtggtttctcaactgatcagtgcgggcttatggccgacagagtgataa

SEQ ID NO: 673 - DNA, 2320 bp, Artificial Sequence
  Synthetic
agagcacatcagacctaaggaaaatataaatggcacgtagtgaggaatcgaacactctggcacgtctgtttgacgtgttgggtgacgatgccgctgccgcacgtgaatgggtaacggaaccccatcgtctgatcgctagcaatgagcgcctgggcacagctccggaagccccggcggatgacgatccggaggccattcggacggttggagtgatcggagggggcacagccgggtatttaacggcgttggctctgaaggctaaacgcccttggttggatgtggcgctcgtcgaaagtgcggatatcccgatcattggggtaggagaggcgacggtgtcttatatggtgatgtttctgcaccattatctgggcattgatccggcggagttttaccaacatgtgcgccctacttggaaactgggcatccgttttgaatgggggtcacgtccggagggctttgttgcgccattcgattgggggaccggatctgttggcctggttgggagcctgcgtgaaacgggcaatgtcaacgaagctacgttacaggcgatgctcatgacggaggatcgcgttccggtatatcgtggcgaaggtgggcatgttagtctgatgaaatatctgccattcgcatatcatatggataacgctcgcctggttcgctacctgacggaactcgccactcgtcgtggcgtgcatcatgtcgatgcgactgtagctgaagttcgcctggatggtcctgaccacgttggggacctgattactacggacggtcgtcgcctgcactatgacttttacgtcgattgtactggatttcgttccctgctgctggaaaaagccctgggtatcccgttcgaatcttatgcgtcaagcctgtttaccgacgcggcaattaccggtacccttgcacatgggggtcatcttaaaccttacactacggcaactaccatgaatgcgggctggtgttggacgatccctactcctgagtccgatcacctggggtacgttttcagtagtgccgcgatcgatccagacgatgcagcagcagaaatggcccgccgtttcccgggcgttacccgcgaagcattagttcgctttcgctccggccgtcaccgtgaagcttggcgcggcaatgtcatcgcggtaggaaacagctatgctttcgtggaacctctggagagttcgggactcctgatgattgctaccgcagtccagatcctggtgagtttgctgccgagtagtcgtcgtgacccgctgcctagcaatgtggcgaatcaggcgttagctcaccggtgggacgcgattcgttggtttctgagtattcattaccgtttcaacggccgcctcgatactccgttctggaaggaagcccgtgccgaaacagatattagcggtattgaaccgttgcttcgtctgttcagtgccggtgcccctctgaccggtcgcgatagctttgcgcgctatttggccgacggagcagccccgttgttctatggcctggagggtgttgataccttactgctgggacaggaagtgcctgcgcgtctgttaccaccgcgtgaatctcctgagcagtggcgtgcccgtgctgcagcagcccgctcattagcctcgcgtggcttacgtcagagcgaagctctggatgcttacgctgcggacccctgtctcaatgcggaactgctgtctgatagcgactcatgggcgggtgaacgcgtcgcggtacgtgcaggtctgcgttaataaaccctgccatttttttagcccaaagaacacggagcatctttatgacgactggcaccacggtagcgcatgctgtagaaccagacggtttccgcgccgtgatggccacactgccggccgctgtggcgatcgttacggcagctgcggcagatgggcgcccgtggggtatgacctgcagttcggtttgctcagtgaccttgaccccgccgacccttctggtctgccttcggacggcgtccccgactctggccgcagtcgtgtcaggtcgtgcatttagcgtgaaccttctgtgtgcgcgggcctatcctgtggcggaattgtttgcatctgcggcagcagaccggtttgatcgcgttcgttggcgtcgcccgccgggtacaggcggtccacatcttgccgatgatgcacgtgcagtgttagactgtcgcctgagcgaaagcgcagaagtaggcgaccatgtggtcgtatttggccaagtccgggcgattcgtcgcctgagtgatgaaccaccactgatgtatggttatcgtcgttacgcaccttggccggcagatcgtggtccgggtgcggcaggcggctaataa

SEQ ID NO: 674 - DNA, 729 bp, Artificial Sequence
  Synthetic
agataacccaatccgtaaggacacacgtcaaggaggcgatttatgacggcacacagcgacgcaggaggtgacccacgcccgcctgaacgcttactgttgggggtgtcaggaagtgtcgctgcactgaacttaccggcgtacatttatgcctttcgggcagccggtgtggcacgtcttgcggtcgtgctgacaccagcggctgaagggttccttccagcgggtgcgttacgcccgattgtggatgccgttcatacggaacatgaccaaggcaaaggtcacgtagcgctgtcacgctgggcgcaacacttactcgtgctgccggcaacagcgaatttgcttggctgtgcagcgtcaggacttgcgccgaactttttagcgaccgttctgctcgcggcagattgcccaatcacattcgtcccggcgatgaatccggtcatgtggcgtaaaccagccgtacgccggaacgttgcaaccttacgcgcagatggtcatcacgtggtggatcctctgccgggcgctgtgtacgaagctgcctcacgttctatcgtggaaggtcttgctatgccgcgccctgaagcgttagtccgtttactgggtggcggtgatgacggttctccagcaggaccggcaggtccggttggacgcgcagagcatgttggggctgttgaggctgttgaagccgtggaagcagttgaggccgttgaggctgcggaagcacttgcgtaataa

SEQ ID NO: 675 - DNA, 1483 bp, Artificial Sequence
  Synthetic
agagccaccatttataaggagaacctaccgatgaccaaaaagtatcggcgtgtatcctacgcagtgtgggaaatcaccctgaaatgcaatctggcatgctctcattgtggcagccgcgccggccaagcccgtacgaaagagctgagtaccgaagaagcgttcaacctggtccgccagctggccgacgtgggcattaaggaagtcaccctgatcggtggtgaagcctttatgcgttcggattggctggaaatcgcgaaagccgtcactgaagccggcatgatctgtggcatgaccacagggggcttcggggtcagtctggaaacggcgcgtaaaatgaaagaagcgggcattaaaacggtgagcgttagcattgacggtggtattcctgaaacccacgaccgccagcgcggtaaaaagggtgcgtggcatagtgcattccggactatgagccatctgaaagaagtcgggatctacttcggttgcaacactcaaatcaatcgtttatcggcgtcagaattcccgattatctatgaacgtattcgcgatgctggggcacgtgcgtggcaaattcagctgacggttccgatgggcaacgccgcggataacgcagatatgctgctgcaaccgtatgaattgctcgacatctatccgatgttagcccgcgttgccaaacgtgcgaaacaggaaggcgtgcgtattcaggcaggtaacaacatcgggtactatggaccgtatgagcgtctgctgcgtggcagcgacgaatggacgttttggcaaggatgtggtgcgggccttaacaccctcggcatcgaagccgacggcaaaatcaaaggctgtccatccctgccgaccgccgcgtacaccggcggtaacattcgcgatcgcccgctgcgggaaatcgtcgaacagaccgaagaactgaaatttaacttaaaagctggtacagaacaaggtacggaccatatgtggggcttttgtaaaacctgcgaattcgcggaactctgtcgcggcggatgcagctggactgcgcatgtgttctttgaccggcgcggcaataatccgtactgccaccatcgggctctgaaacaagcccaaaaagacattcgcgaacgcttttatttaaaagtgaaagcaaagggcaacccgttcgacaatggtgaatttgttatcattgaagaaccttttaacgctccgttacccgagaatgacctgctgcactttaacagtgatcacattcaatggccagaaaactggcaaaatagtgaaagcgcgtacgcattggccaagtaataaatataaagttaaggagttgcacatgaacagtaatcagatccctaacaaagttgcaaccgcggcacagaaatctgacgacagcagcagcgtattaccgcgccaggggtggcaagacaaacaagcctttattaaggcactcattaaagccaaacagtctctcgaaattgccgaaattagcaactttttaacc

SEQ ID NO: 676 - DNA, 1082 bp, Artificial Sequence
  Synthetic
agacgtcactatcaaacacactaataccacataaggagcgaacaatgacccagtatcccctgtcgcgtccagaaccgctgggcgtgcacccagattatcgtcgcctgcgtgagacttgcccggttgcacgtgtgggtagcccgtatggcccagcgtggcttgtcacccgttacgccgatgtggccgcagttctgaccgatgcccgttttagtcgtgcagccgctccggaagatgatggtggcatcctgctgaacaccgatccgccggaacatgatcgtctgcgtaaactgattgtagcacacacaggcaccgctcgcgtggaacggctgcgtccgcgtgctgaagagatcgctgttgcgttagcgcgccgtatcccgggcgaaggcgaattcattagtgcatttgccgagcccttcagccatcgcgttttgtctttatttgttggccatcttgttgggttaccagcgcaggacctgggccccttagcgaccgtagtgactctggcacccgttcccgaccgcgaacgtggcgcggcatttgcagagctgtgtcgtcggctgggtcgtcaggtggatcgcgaaacgcttgcagtagttttaaacgtggtctttggcggacatgcggctgtagtggccgcgctgggttattgcctgttagctgcattagatgcgccactgccacgtctggccggtgacccagagggcattgccgaactggtggaagaaacccttcgtttggctccaccgggagatcgtacactgttgcgtcgtactacagaacctgtggaacttggcggtcgcacattaccagcgggtgcgcttgtaatcccgtccattgcagccgcaaaccgtgatccggatcgccctgtgggccgtcgtatgccacgtcatcttgcatttggacgtggagcgcatgcctgtttaggcatggcgctggcgcgcatggaactccaggcagcactgaaagcgttagcggaacacgcgccagacgtacggttgccggctggtacaggcgcgctggtccgcacacacgaagaactctcggtgagcccgctcgcaggaatcccaattcaacgctaataa

SEQ ID NO: 677 - DNA, 1148 bp, Artificial Sequence
  Synthetic
agaggaacggataaggaggtcaatatatgctgtctagcgcgctggaggtggatatcgatgaagctgcggtggcggcggacttacgcgaattggccgcagctctggatcgcagtggttatggtgaaatcctcacctgttttctgcctcagaaggcacaggcgcatatctgggctcagaccgctgcaaaaattgatgggccgttgcgtaccctgatggaattattccttctgggtcgggcggttccccaggatgatctcccgcctcgcatcgcggccgtgattcccggtttagttagcgcaggtctggttaagactggacagggcgcggtttggctgccgaacttgattctgctgcgtcctatgggccagtggttatggtgtcagcggcctcacccctcaccgaccatgtactttggtgacgatagcctggcgctggttcaccggatggtaacatatcgtggcggccgtgccctggatttatgtgcaggtccgggtgttcaggcccttaccgcagccctccgctcagagcacgttaccgcggttgagatcaatccggtcgcggcagccctttgccgcaccaacattgccatgaacggtctgtccgaccgcatggaggttcgcctgggctcactgtacgacgtcgtgcgcggtgaggtttttgatgatattgtatcaaacccgccgctgctgcctgttccggaggatgtgcaattcgcctttgtgggagatggcggacgcgatggtttcgatatttcttggacgattctggatggcctgcctgaacatctgtccgaccgtggtgcgtgtcgcatcgttggttgtgttctgtccgatggctatgtgcctgttgtgatggaaggcttgggagaatgggccgctaaacacgatttcgacgtgcttcttacagtgaccgcacatgtcgaggcgcataaagatagtagttttctgcgttcaatgagcctgatgagttcggcgatctcaggccgcccagcggaggagctgcaagaacggtacgcagctgattatgccgaactgggcggttcccacgttgcgttctatgaactgtgtgcccgccgtggtgggggttctgcacgtctggccgacgtgagcgctacaaaacgcagtgcggaagtgtggtttgtttaataa

SEQ ID NO: 678 - DNA, 1151 bp, Artificial Sequence
  Synthetic
agatcatttccaataagggggacactatgagcctgacgaatgtcaagccgttgattaaagaatcccaccacatcattttagctgacgatggtgacatttgcattggggaaattccgggggtgtctcaggtaatcaatgacccgccgtcgtgggttcgtcctgccctggcaaagatggatggcaagcgtactgtcccccgtattttcaaagaactggtcagtgaaggcgtacagatcgaatccgaacatctggaaggcctggtagccgggcttgccgaacgcaaacttctccaggataacagtttcttttccaaggtgttaagcggtgaagaagtggagcgctataaccgccagattctgcagttcagccttatcgatgcggataaccagcaccctttcgtttaccaagagcggctgaaacagtctaaagtcgctatcttcggtatgggtggctggggcacgtggtgtgcattgcagctggccatgtcaggcattggtacactgcggctgatcgacggcgatgatgtggaactgtcgaacattaaccgccaagttctgtatcgcacggatgatgtaggtaaaaacaaagttgatgccgccaaagacactatcctggcatacaacgaaaacgtgcatgttgaaaccttctttgaattcgccagcccggaccgtgcccggcttgaagaacttgtgggtgattctacctttattatcctggcttgggccgcgttgggttactaccgtaaagatacggcagaggaaattatccattcgattgcgaaagataaagcgatccctgtaattgaactcggcggtgatcctttggaaatctctgtcggtcctatttacctgaatgatggcgtacacagcggcttcgacgaggtgaaaaattccgttaaagataaatactacgacagcaacagcgatatccgcaaatttcaagaggcgcggttgaaacacagcttcatcgatggcgatcgtaaagtgaacgcgtggcaatcagcgcccagcctgagtattatggctggtatcgtaacggatcaggttgtgaaaaccattaccgggtacgacaagccacatctcgttggcaagaaatttatcttgagtctgcaagatttccgcagccgcgaggaggagatctttaaataataa

SEQ ID NO: 679 - DNA, 1016 bp, Artificial Sequence
  Synthetic
agaaatttttcataccgagggaggaaaatatggctctcaaaacctgcgaagaatttctgcgcgatgcgttagatccggatcgcttcggccgcgagatgaaggcagtaacagaaattcccgagatcgttaaactcggccatcgtcatggttatggatttactgccgaagaatttctgaccaaagctatgagttttggtgctccgccggcaggagcagcagcacctggcgaatcagccagcgttcctggccagaacggttcctcccccggacacgctgcgcgtgcagctatggctggtccagaagcaggggccaccagctttgcccactatgaataccgtctggatgagctgccggaattcgcccccgttgtggccgagcttccgaaactgaaagtcatgccgccttccgtgggacctgatcggtttgcagcacgctaccgtgatgaagatatgcgcacaatttcaatgagtccggcggatccggcttaccaggcttggcaccaggaactggcgggtcgtggttggcgcgatgcagaagatacggctgctgctccagatgccccacggcgcgattttcatctgctgaacctcgatgagcatgtagattacccaggttatgaagaatattttgcggccaagacccgtgtcgtcgcggcactcgaaaacctgtttggtggtgacgtgcgttgctcaggctctatgtggtatccgccgtcgagctatcgcttatggcatacaaatgccgatcaaccggggtggcgtatgtacctggtagatgtagatcgcccattcgcggaccccgaccgtacctccttctttcgctacctgcatccacgtacccgtgaaatcgtcacgctgcgcgaaagccctcgtattgtccgtttctttaaagtcgaacaggatcccgagaagctgttctggcactgtatcgcgaaccccaccgatcgccatcgctggtcgtttggttacgttgttccggaaaactggatggacgccctccgtcaccatggctaataa

SEQ ID NO: 680 - DNA, 2024 bp, Artificial Sequence
  Synthetic
agaggcctacagatattccagactaacactaaggaggaaaacgatgcagccagacctggaggttgttgatgttcgtcgcggcgagtcgttcaaggcatggtcgcatgggtacccatatcgcactgttcgctggcacttccatcctgagtttgaagtacatctgatcgtggaaaccaccggccagatgtttgtgggtgattatgtcggaggctttggtccgggtaatctggtcctgatgggtcccaatctgcctcataattgggtgtctgacgttcctgagggtaaaaccgttgcagagcgtaaccttgttgttcaatttgggcaagcgttcgtttcccgttgcgaggattccttaacggagtggcgtcacgtggaaacgttactggcggatgcgcggcgtggcgtgcaatttgggccgcgcacctctgaggccattaaacctctgttcgcggaactgattcacgcgcgcggcctgcgtcgcattgtgctgtttctgtctatgctgcaaatcctcgtcgatgcaacggatcgcgaactgctggcatctccagcttatcaggcggatccttcgacatttgcaagcacgcgcattaatcatgcgctggcctacattggaaagaatctggcgaacgagcttcgtgaaacagatttagcacggctggccggacagtctgtttccgccttctctcattattttcgtcgtcataccggcctgcctttcgtgcagtacgttaatcgcatgcgtatcaacctggcctgtcagcttctgatggacggggacgcatcggtgacagatatttgtttccgtagcggttttaacaacctgtccaattttaaccgtcagtttctggcagtgaaaggtatgtcacccagtcggttccgtcgctaccaggctctcaacgacgcgtcacgtgatgcgagtgaagcggctgcaaaacgcggcgcaggtattgcaggtgcaccggcaatcgttccagcggctcaagcacgtggcgaggcacgcccaattcctgaagtgctgcttagcggctaataatggcttccgtttttcaccacttgttaaggagtactttatgatgctgacggcgagctccacaccggcatccggtaatccagctgcccgtgcattgcgcgccgctgcctttgcactggccttaggcggagcatgcgttgcgcatgccgcacctctgcggattggcatgacattccaagaattgaataacccgtattttgtgaccatgcagaaagcactgaacgaagccgcggcgagcattggcgcgcaagtgattgtaacagacgcacatcacgacgtgtcaaaacaggtatcagacgttgaggatatgctgcagaagaaaattgatattttactggtgaatccaaccgactccacgggcatccagagtgcgattgtttccgcaaagaaggctggcgccgtggtcgtggcggtcgatgccaatgccaatggcccggtggattccttcgtagggtccaagaattttgatgccggcgctatgtcatgcgagtaccttgcgaaagcgatcaacggcggcggcgaagtggccattctggatggcatcccggtcgtcccaatcctggaacgtgtccgcggctgccgcgcggcactggccaaattcccgaatgtgaaaattgtcgacgttcagaatggaaaacaggaacgtgcgacagcgttaacggtaaccgagaatatgatccaggcgcacccgaaactgaaaggtgtgtttagtgtaaacgacggcgggtcaatgggcgctttgagcgccattgaagcgagcggcaaagatatccgcctcacgtccgtagatggtgccccagaggcggtggcggcgattcaaaagccgaactccaaatttattgaaacaagcgctcaatttccgcgcgaccagatccgtttagcgattggtattggcctggccaagaaatggggcgcgaacgtgccaaaagcgattccagtcgacgtgaaactgattgacaaagggaacgcgaaaacctttagttggtaataa

SEQ ID NO: 681 - DNA, 2598 bp, Artificial Sequence
  Synthetic
agacaattcataaggaggttaaggtatgaaaggcgaggaaatgttgggacatccacagaccggttttgttgtactgccagacaacgatgccaccggcgacgtgacgggccgcctgttaccttggggtgatgtagttacagtgtatccgtctggccgtccatggatcatcggcaactgctgggatcgcccagtcctcgtccatgatggcgtgatcgtcttgggtcataccagcgtcacgcgtgatcaaattgcccgtcatgggaacgatccgcatcgcttactggacgaggccgacggcgcatttcatgcggcggtcctgatcggacacgaagttcatgttcgcggctccgcctacggtgtctgtcgtctgtatacatgcgttgttgacggtgtgaccttagtgagtgatcgtacagacgtcctgcagcgtctggcaggtactgatgtggacgtcgacgtgctggctggccacttgttagagccgatcccgcactggttaggcgaacaaccgttattgacgtccgtggagcccgtgccaccgacacatcacgttattttaactccggacgcacgtagtcgtttacggccatcacgtcgtcgtcggcctgaaccgtcgctgggtttgcgggacggtgcggaacttgtccgggagcgtctggccgcagctgtggctacccgtgtggacagtccagcgttaattaccagtgaactgagtggcggctatgattccactagtgtgtcatacttggcagcgcgcggtaaagccgaggtggtgctggtcacggccgcgggacgtgacagcacaagcgaggatctgtggtgggctgaacgcgcagccgcagggctcccggaactcgatcacgtagtgttacctgcggatgaattaccgtttacgtacgccggcctgacggagcctggtgcacttttggatgaaccgtgtacggctgttgccggccgtgagcgtgtactggcgctggtacgtaaagccgcggcccgcggctctacacttcatctgactggccatggtggcgatcacctgtttacttcactgccgacaccgtttcatgacctgtttcgtacgcgtccagtcgccgcgctccgccagttgcgtgcatttggcgcgttggctgcgtggccgacccgtaagctgatgcgcgaactcgcggaccgccgcgatcatagcacctggtggcgcgcgcacgcacgtcctcagaatggccagccggatccgcacagccccatgttaggctgggcaattcccccgactgtcccggcgtgggttactgctgacggcgtgcgcgcgatcgaacttgggattttagaaatggcagaacgcgcggagccccttggtcatgcgcgcggagaacacgctgagctggattcaatctttgaaggggcgcgtatggcccgtggcctcaatcgtatggctacgcatgccggagtcccgcttgcagccccgttccatgacgatcgggtcgtggaagcgtgtctgtcgatccggccggaggaacgcatttctgcatggcagtacaaacccttactgaacgccgcaatgcagggtgtggtgccgagcaccgttcttgatcgtagcgctaaagatgacgggagtattgatgtggcctatgggctgcaggaacaccgtgatgaactggtagcgctgtgggaatcatcacgtctggcggaaaccggtctgattgatgcgggtatgctgcggcgtttatgcgcgcagccgtcctcccacgagctcgagcatggatccttgtacgctactatcgcttgtgagttgtggctgcgtggtttagatcaggatcgtacccaacgctactaataacctactactctgatccccataaggaggttttttatgccggtgcagctgcgtcggcatgtgtcttttacggctacggaatacggcggcgtgctgctggatgaaaccaaaggcgcatactggcgtctgaacaccacaggcgccgaagttgttcgcgccatgggggaagccgagcgggatgagattgtacggcatgtggtggcgaccttcgatgttgatgcgcaaaccgcagcccaggatgtcgatgtcctgctggcagaacttcgtgatgccggccttgtggcctcgtaataacaacctaatcttaggcgaggtcattttttatgtctgtgaatatggctctccgtggccatggtatgtccggtcgccgtcgtcgcttagatgccacgcgtgctcgcctggccgttgtggttgcccgtgtcctgaatctcttaccgccgcgcttaatccgtcgttgtttgcgtgtactgagtcgcggagcccgccctgcctcgattgaggcagcagaagctgctcgtcgtactgtggttgcggtgagtccagctgccgccggtgcgtacggctgtttaatccgcagcattgccaccaccctggttcttcgttcacgcgggcaatggccaacctggtgtgttggtgtacgtgcggagcctccttttggtgcccatgcctggattgaagcagaggagcggctggtggatgaacctggtactatgcatacttaccgtcgtcttatcaccgttggtccactgtctcgcaaagttcgttaataa

SEQ ID NO: 682 - DNA, 1070 bp, Artificial Sequence
  Synthetic
agagccatcagatttaaggaacataaaaaatgtctatcgaactgacgcctagtttggccgatctggtcgatccacttccaggtcacgcactgcgcgctgcggcgacattacgtctggcagatctgattgcggctggtgcagatactgcaccggcattagcagcggcggcacgcattgatgctgacgcgatcgcgcgtcttatgcggtatctgtgcagtcgcgggatttttcaagcacatgaaggccggtacgcgttgactgaatttagcgaattgctgctggatgaagatccatctggcctgcgtaaaaccttagatcaggatagctatggggatcgtttcgaccgcgcggttgcggaactggtggacgttgtacggtccggtgaaccttcttatcctcgcctttacggctcgacggtttatgatgacctggcagccgatcctgccctcggcgaggtgttcgcggatgttcgtggcttgcactccgcagggtatggggaagatgtcgcggcagtggcgggttggtcctcatgcctgcgcgttgtcgatctgggtggagggactggctccgtcctgcttgctgtgttagagcgtcacccgtccctgtcaggcgcagtactggatctgccatacgtcgccccgcaggcaaagaaagctctgcaggcctcagcgtttgcccaacgttgtgaatttatcaaagggagcttcttcgatccgttacctccggcagaccgttacctgttgtgtaacgtgctgttcaactgggatgacgcgcaagcaggcgctattttggcacgctgtgcgcaggcgggccctgtggccggagtagtggtagccgaacgtttgatcgatccggatgcggaagtggaactcgtagcagctcaagatctgcgtctgttggctgtttgcggcggtcggcagcgtggcaccgctgaattcgaagcgcttggggcagcccatggcctggcgttaaccagcgttaccctcacggcatctggtatgagcctgctccgtttcgatgtgtgtcgtgccgggagtgctggcggggaagttgtggaaaaatcttaataa

SEQ ID NO: 683 - DNA, 2622 bp, Artificial Sequence
  Synthetic
agagtttaggagaaagacataaggaaatattaaatgcctgagcttccccgtttcgcgacggcccctcgtcacgtgcgtgccctggatttcggtcatgttctggtcctgatcgattaccgttccaatcacgtccagtgcctgcttccggcagccgcagcccattggacagccacagcgcgtaccggccgcttggacaccatgccggcagcgctggccacccagttactgacatcggcgttattagtaccgcggccgaccgcaacaccgtggacggcacctgtagcggcaccacctgctccaccgtcatggggtggatccgagcatcctgccgggacatcacgccctcgggcacgtcatcggcactcaaccacggctgcggcggcgctggcatgtgtgctggcgattaaggcagcaggcccaacccgctatgctatgcagcgcttgaccacggtcgtgaaggcagccgcttctacgtgccgtcgcccggcaacgccagcacaagcgacggctgctgcgcttgcggtccgtcaggcatgctggtactcgccagcgcgtacagcctgtctggaagaatccgccgcgactgtcattttactcgctacccggcgtttgagttcgacatggtgccatggagtagctcccgatccgattcgcctccatgcctgggtggaaactgaggatgggacacctgtagcagagccagcctcgacccttgcgtacaccccggccttaaccattggaggccaccatcaacaccagccttaataaggaagcagccgtaaaaggtaggttttttttatgatctttggtggattttcgacgacccgtgaagttcgtcaacgccctggtaatgccgagtttattgctacggactcgcctatttggcgcctcggtcgtagtccagctcgttgcgtggctgcggaccatggacagcgtcgcctggtagtgttgggagaatgcggggcaacggatggcgaattatctcgcctggcgaccgcggggctgcccacggatattacctggcgctggccaggcgtgtacgtggtggtcgaagaacaaccggaacgtacggtgctgcacactgatccagcagctgcactcccggtatacgcaaccccttggcaaggcggctgggcatggtcaaccagcgcgcgcatcctggcacgtttaacagaagctccaattgatggtcaacgcctggcatgttcagtgctggccccgtctgttccggctctgagcggtacccgcacattctttgcgggtatcgaacaattggccctgggttcgcgtattgaactgccggtggatgggtcccgtctgcgtgttacggtacgttggcgcccggatccagtcccgggagaaccatatcatcgcttgcgcacagcgttgaccgaggcggtcgccctgcgtgtcaaccgcgcaccagacctgtcatgcgacctctcgggcggcctcgattccacgtcactggcagtcctggcggctgtgtgcttaccggagtcccaccatctgaatgctatcacgattcatccggagggcgatgaaagtggcgcggacttacggtatgcgcgcttggcagctgcgcaccacgggcgtattcgccaccaccttctcccccttgcggcagaacacctgccgtatactgaaattacggcggtgccccctaccaccgaaccggcaccttcaacattaacgcgtgcacgcctcgcgtggcagttagattggatgcgccagcacttaggcagccgcacccatatgactggcgatggaggcgacagcgtactgttccaaccgccggcacatctggcggatctcctgcggcatcggcagtggcgtcggactttgtcggaaagtttgggatgggcacgccttcgccatacgtctgttttacccttactgcgtggagcagcaactcttgcacgtacatcacgtcggtcgggcctccaggatctcgcacgcgcattggcgggtgcaggtcagcagggcgatggtcgtggcaatgtgagctggttcgcaccattaccgctgcctggctgggcgaccccaaccgctcgtcgcttactgcttgatgcagccgatgaagctatctcgaccgcggatccgttaccgggactggatacgtcgctgcgcgtactgatcgatgaaattcgcgaagtcgcccgcacggcagcggcagatgccgaactggcggatgctcacggaacgactctgcataacccatttctcgatccgcgcactattgatgcagtcctgcgcacgccaatcgcacatcgcccggcggtccactcgtataagccagcgctggggcatgcaatgcaggatttgctcccgggtgcagtcgctcggcgctcaactaaaggctcttttaacgccgatcattatgcggggatgcgtgcaaatctgccagcattgacagcgctggcagatggccacctggccgacctgggtttgttggagccgacgcgcttccgcagtcatcttcgccaagccgccgcgggcattccgatgccgcttgcggcgatcgaacaggcgctgtctgccgaagcatggtgtcatgcacatcacgccaccccaagccctgcctggacaacgcagccaccggaacacccgcatgcctaataa

SEQ ID NO: 684 - DNA, 644 bp, Artificial Sequence
  Synthetic
agacgcttgaaccagcaataaggagagtaattatgagcacgtcccccgaacagaccctctggatctcaactgatacctgtggtctggggccgtatcgcgctgacttggtggatacctattggcagtgggaacaagacccaacattgcttgtaggctacggtcgtcagtcaccgcagtcactggaggcccgcacggaaggtatggcccaccaattgcgtggcgataacatccgtttcactatctatgatctgtgcagcagtacacctaccccggcgggcgtggcaacgctgctgcccgatcatagcgtccgtactgccgagtatgttattatgcttgcgcctgaagcacgtgggcgtggcttaggaaccaccgccacgcagctgacgttagattatgcgtttcacatcaccaatctgcggatggtctggttgaaagtactggcgccgaacaccgcgggcatccgtgcgtatgagaaagctggctttcgtacagttggagcgcttcgcgaagccggctattggctggggaaggtctgcgatgaggtactgatggatgccttagcgaaagacttcacgggtccaagtgcagtccacgcagcattaactggcgccagcggtcgccagctgcgccgtgcaccttaataa

SEQ ID NO: 685 - DNA, 2022 bp, Artificial Sequence
  Synthetic
agagcttcaccctacaaggaggatatagaatgtcaaaacacgaactctctttagtggaagtaacgcattacacagatcctgaagttctggccattgttaaagattttcatgtcagaggtaactttgcttccctccccgaatttgctgaacgaactttcgtgtccgcggtacctcttgcccatctggagaaatttgaaaataaagaagttctcttcaggccaggtttcagctccgtaataaacatatcctcatcacataattttagtcgtgaaaggctcccatcaggaataaacttttgcgacaaaaataaactttccattcgtactattgaaaagttattagtcaatgcattcagctcacctgatcctggctctgtaaggcggccttatccttctgggggggcattgtacccgattgaagtttttttatgcagattatctgaaaatacagaaaactggcaggcaggaactaatgtttatcactacctgccgctaagtcaggcactagaacctgttgctacatgtaatactcagtcactctaccgaagcctgtccggtggggattcggaacgtcttggtaaaccccattttgctctcgtctattgcattatttttgaaaaagctttgttcaaatatcgctacagaggataccggatggccttaatggaaacaggttcgatgtatcagaacgcagtattggttgcagatcaaataggactgaaaaaccgggtatgggcgggatataccgattcatacgtagcaaaaacaatgaatctggatcagaggactgtagcgccactgatcgttcagttttttggagatgtaaacgatgataaatgtctacagtaaccttatgtccgcatggccggccacaatggccatgagtccaaaactgaacagaaatatgccaacgttttctcagatatgggactatgagcgtattacaccagccagcgcggccggtgaaactctgaagtcaattcagggggcaataggtgaatattttgaacgccgtcatttttttaatgagatagtcaccggtggtcagaaaacattatatgagatgatgcctccatctgctgcaaaggcttttaccgaagcattttttcagatctcatcactgacccgcgatgaaatcataacccataaatttaaaacggtcagagcctttaatctgtttagccttgaacaacaagaaatacctgcagtcataattgcactcgacaatataaccgctgcagatgatctgaaattttatcctgacagagatacatgcggatgtagctttcatggtagtttgaacgatgccatagaaggttccttgtgtgaatttatggagagacagtccctccttctttactggttacagggaaaagccaatactgaaatatccagtgaaatagtaacaggcataaatcatatagatgagattttactggctctcaggtcagaaggagatatcaggattttcgatatcaccctgcccggagctcctggacacgcagtactaaccctgtatggcacaaaaaacaaaatcagtcgaataaaatacagtaccggattatcctatgctaatagtctgaaaaaagcactttgtaaatccgtagtggaattgtggcaatcgtatatatgcctgcacaactttcttattggcggttatactgatgatgacattattgatagttaccagcgtcactttatgtcatgcaacaagtacgagtcgtttacggatttgtgtgaaaatacggtactactgtctgatgatgtcaagttaacgtttgaggaaaatattacgtcagacacaaatttattaaactatcttcaacaaatttctgataatatttttgtttactatgccagggaaagagtaagtaacagccttgtctggtacacaaaaatagtaagccctgattttttccttcatatgaataactcaggtgcaataaacattaataataaaatttaccataccggggacggtattaaagtcagagaatcaaagatggtaccattcccataataa

SEQ ID NO: 686 - DNA, 1274 bp, Artificial Sequence
  Synthetic
agagttcatcagtttattaggaaaatatgatttttggcccggattttcatcgcgatccgtatccagtgtatcgtcgtctgcgtgatgaggctccgtgccaccatgaaccagcgttaggtctgtatgcgttgagccgctacgaggacgttctggctgcccttcgtcagcccaccgtgttcagctcagcagcgcgtgcggtagcctccagtgcagcgggagcaggtccataccgcggtgccgacaccgttagtccggagcgggaaactgcggctgaagggcccgcccgtagcctgttgttcctggatccgccagagcaccaggtgctgcgtcaggcggtgtcccgtggctttacgccgcaggcagtattgcgccttgagccggccgtccgcgacattgcggcgggtcttgctgatcgtatccccgatcgcggtggtggcgagttcgttaccgaatttgcggctccgctggcaatcgcagtgattctgcggttacttggtgtaccggaagcagatcgtgcccgcgtaagcgaacttttatcggcatcagccctgtcgggggcggaagcagaactgcgctcctattggctgggcctttcggcactcctccgcgatcgtgaagatgcaggcgaaggtgacggagaggatcgtggtgtggtggcggctctggtccgtcctgatgctggactgcgcgacgcggatgttgccgcaggacctgccgtgcgtgcaccgctgacggatgagcaggttgcagcattctgcgccttagtggggcaagccggcactgaaagtgtggcaatggcgctctccaacgcattggtcctgttcgggcgtcaccatgaccagtggcgcacactgtgtgcgcgtccggatgcgattccagcagcattcgaagaggtcctccgctattgggcacctacgcagcatcaaggtcggacgttaaccgcggcggtacgtttacatggccgtctgctgccggccggtgcgcatgtactgctgctgaccggttcagccggccgggatgaacgtgcgtacccagaccccgatgtatttgacatcggtcgcttccacccggatcgtcgtccgtcgaccgcgctgggttttggtctgggcgcacacttttgtttaggcgctgctctcgctcgtctgcaggcacgcgtagcgctgcgcgaactgacacgccggttcccgcgttatcgtacggacgaggaacgcactgtgcgttcggaagtgatgaacgggttcggccacagccgtgtaccattttccacgtaataa

SEQ ID NO: 687 - DNA, 2979 bp, Artificial Sequence
  Synthetic
agacaattgaagcaggctagccaggagttccatatgaagtttaacaagaacgtgttcccagagatcaatgaaacggatttcgataacaatatcaagcccctgctggatgaactggaatctcgtattaccattccgcaggaggaactgagcttttcaagcattaacgatgatttatttcgcgagttaacccgcaacgaggagtacccttaccagagcatttgtacgatcgttgcaaacatcgtgatggatgacggcagtgagatttggcgcaaagatatttttgttgattccaatagtgtgcgcgaagccgtatgcgacattctgagccaaacgttattcctctatttcatccgctgcttctccgaacaaattaaagacattcgcaaaactgatgaggataaagagtccacctacaaccgctacattaacctcctgttcagctccaacttcaaaatcttctccgacgaataccctgtcctgtggtatcggaccattcgcatcatcaaaaatcgctggtattctatcaagaaatcgttactgctgactcaaaaacaccgtgtggagatcgataagcagttggacatcccgcacaagatgaagattaaaggcctgaaaatcgggggagacacgcataacggcggtgccacagtgaccacgatcttctttgagaaagggtataaactgatttataagccgcggagcacatccggcgaattctcgtacaagaaatttatcgaaaagattaacccgtacctgaagaaagacatgggagcgattaaagcgatcgatttcggtgaatacggcttttctgagtatattgagtgtaacacggatgaagaggacatgaaacaggtcggtcagcttgcatttttcatgtacctgttgaatgcatcagatatgcattatagcaatgtcatttggaccaaacagggccctgtgccgattgatttagaaaccttgttccagccggatcgtattcgcaaaggcctgaagcagtcggaaactaacgcgtaccacaaaatggagaaaagtgtatacggaacgggaattattccaatttccctgagcgttaaaggcaaaaagggtgaggtcgacgtcggctttagtggaatccgtgatgagcgctctagttcgccgtttcgcgttctggaaattttggatgggttttcgagcgacatcaaaatcgtgtggaaaaagcagcagaagtctagctccagcaaaaacaatctgattgtcgatcacaaaaaggagcgcgaaatccttcagcgtgcccagtccgtcgtagaaggtttccaggaaacctctaaaatcttcatgaaacatcgtgaggaattcatctccattatcttagactcattcgagaacatcaaaattcgctacatccataacatgacgtttcgctacgaacagttgctgcgcactctgacggatgccgagccggcccagaagattgagttagaccgtctgctgctgagtcgtaccggaattctgtccatctcgtctagtccctacatctcgctctccgaatgtcaacagatgtggcagggtgacgtgccgtacttctactcgaagttttcgagcaaaagtatctttgataccaatggcttcgttgatgaaatcgagctgacgccccgccaggcatttatcatcaaagccgaaagtatcaccaacgatgaagtcgattttcagtccaagatcattaaactggcgttcatggcacgcttaagtgacccgcacacaaccaacgacaacaaactgaataaaaaggtgattatcgaaagcaaccagcagagcaacagcagtgaatcaggtaacaaagccattttgttcctgagcgatctgctgaaaaataacgtactggaagatcgttatagtcatctgccgaaaacttggattggccctgtagcacgtgatggcggtttgggttgggcgccgggcgtgctgggatacgatctgtactcgggccgtacaggacctgcgttagcattggctgcggccgggcgcgttttgaaagataaagacagtatcgaacttagcgccgacatttttaataaatcgtcccagattctgcaggaaaagacttacgactttcgtaacctgttcgcatcaggtatcggcggttttagcgggattaccggtctgttttgggcgctgaacgcggcagggaatattctgaacaatgatgactggattaaaacctcgaatcagagtatgctgctgctgaatgagaacatgctgaaagtggacaaaaatttctttgacctgattagcggcaactcgggagcgatcggtatgatgtacctgaccaatccaaatttctatttgtctcgctcgaaaattaacgacattctgctgaccacggactgcttgattactgaaatggaaaaagacgaaacgagcggactggcccatggcgtgtctcagatcctgtggttccttagcattatgatgcaacgtcagccctcaagtgaaatcaaaatccgcgcgacgattgtcgacaacatcatcaagaagaagtatacgaattcctatggcgaaatcgaatgctactatccgactgatgggcactccaaatccacctcgtggtgcaacgggacaagtgggattctggtcgcctatattgaggggtataaagctaatatcgtggacaaatcctcggtgtatcatattattaatcagatcaacgtcgaacaacttcagcatgataacattccgatcatgtgccatggtagccttggtgtgtatgaatcgcttaaatatgcgtcaaagtactttgaaatcgaaaccaagtaccttctggatgtgatgcgcaatggcggctgctcctcccaagaagtattaaagtactatggcaagggtaacggccgttacccgctgtcaccaggtttaatggcgggtcagtcgggcgcgttgctgcactgttgcaaactggaggataacgatatcagcgtgagccccatttcactgatgacgtaataa

SEQ ID NO: 688 - DNA, 2818 bp, Artificial Sequence
  Synthetic
agaattccaccccccactaaggaggttttttatggatccgagtatcaaaaagctcgtggattctatcatcgaattctacaaaaaggacatctacctggcatacaaagagctggaacgcgaaatcaaaaacatcgataagaccatctacaacacttcaaatgacgagatcttgcggatttttaaagagagcctgatcagcatcatcaccgatgatatttaccgcctctcgattaaaaccttcatctatgagtttcacaagtttcgtatcgataacgggtttccggctgtcaaagatagcgaaagcgccttcaattattacatcagtacctttgacgtgaaaacgatcgctcgctggtttgagaaattcccaatgctggaatccatcatctccagtagcatcaaaaacgattgcacatttatggtggatgtatgtgtcaatttcatcttagacctgtcggaatgcgagaagattaatctgatctcagaggatagccggctcatcacgatctcatccagcaactctgacccgcacaacggtggcacgcgtgtcttgttctttcgtttccacaacggtgataccattctttacaaaccccgcagcctgaccgtggacaagctgatctctaatattttcgaagaggtattcgaattcgatgcgacgaactcgaaaaatcctattcccaaggtgctggatcggggtacctatggctggcaggaattcattgagaagaaatcgatctcttcctcagagattaagcaggcctactataacctgggtatctttagcagtatctttacagtgttagggtctactgatatccacgatgaaaacttgatttttaaaggtacgaccccgtatttcatcgatctggaaacagccctctctccgcgtatccggtatgaaggtaatgaggaaaacctgttctatcggatgagctcatcgttgttcacttctatcgtggggacgactattattcctgcaaaacttgctgtccattcccaggaaattatgatcggcgcaattaacacccctgcgaaacagaaaaccaagaaggatggctttaacatcatcaacttcggcacggatgccgtcgatatcgcaaaacagaatattgaggtggagcgtattgctaaccctatgcgcattaaaaataacatcgtgaacgatccgctgccgtaccagaacatctttacgcgcggcttcaaagaggggatcaaatccatcatcctgaagaaaggctcgatcatttccattctgaacaacttcaacagcccgattcgttacatcatgcggccgacggcaaaatattatttgattctggatgccgcggtatttcccgaaaacctgtattcggaacagacactgaacaaaaccctgaattacttaaagccgccaaaaatcgtggaaaattccctgatttctaaacagctctttcttgccgaaaaacgcattctgtccgaaggcgatattccgagcttctatgtgctgggcaaagagaaaaatatccgtgcgcagaacttcattagcgaacagatcttcgaggaaaccgcggtcgataacgcgattcaaattctggaatccatttcgcaagactgggtgaattttaatgagcgcctgattgcggagggcttctcctatattcgtgaacagagtcgtggctatctgtccagtgattttgagaactctgatattttcaaaagctcactgaccgaaacaaagaagtccggttataccgcaatgctgaaaacaattatctccatgtcggtcaagacctcggaaaacaaaaagatcggttggctgccaggcatttatgatgattatccgatcagctatatgagtgccgcgttttgttcgttccatgattccggcggtatcatcactttgcttgaacaccactttgggcactgctcccccgaatataacgagatgaagcgcgggctgctggaactgggcaaaatgttgaaaattaacaatagtaacctgagcatcatctccggctcagagtctctggaatttctgtatacgcaccgcgaagtcgaatgcctggaactggaatacattttaaacaattcagcggaaatcatgggcgacgtgttcctggggaaattaggcctttatcttatcctggcgagctacctgaaaacagacctgaaaattttccaagatttcagtatcatctgccagaaaaacctcgagtttaaaaagttcgggatcgcgcacggtgaattagggtatctgtggaccatcttccgtattcaaaacaaactgaagaacaaaaatgcgtgtctgagcatctatcatgaagtgttgaacatttataaaggtaagcgcattgaatccgtgggatggtgcaacggtttatcgggtattctgatgattttgtcagaaatgagcaccgtattagagaaaaatcaagactatctgttcaagctggcaaatctgagcactaaactgaatgaggaatccgttgacctgagtgtgtgccacggcgccagcggggtgcttcaaacactgcttttcgtctatagcaacacgaacgataaacgttatctcagcctggccaataagtattggaagaaagtgctggataacagcattaagtacggtttctacaatggagaacgcgataaggattatctgttgggatatttccagggttggtcaggcttcacggacagcgcactcctgctggataaatacaataacaatgagcaagtgtggattccgatcaacctgagctccgatatctatcagcataatctgaacaactgcaaagagaagaattatgagggcgatggctgccataaatcttaataa

SEQ ID NO: 689 - DNA, 3048 bp, Artificial Sequence
  Synthetic
agatcacccataccaagtataacgagaacctccatgaatgatatcaacaaaaacaaaactaaaaccattaacgaaaagattaaaattttcaccaaagaagaggtgattgatatcagttactttgaagaatggcgcagcgttcgtactctgcttaacgaaaactactttaaaattatgctcgaggaaatgaatatttccaaaaaccaattttcgtatgcgctgcaaccgttaaacgacgagttcaaactgcatactaacgttaaaaatgaagaatggatcaaatgctttaatcgcgtcattaacaattttaactataaaaatattaactataaagttggtttgtacctgcctattcagcctttctccgtttatttacaggagaaactgaaagagatcctgaagaagctgaacaacattaagattaatgataaaattatcgacgcctttatcgaagctcacctgatcgaaatgttcgacctcgtcggtaaagtaatcgcccttaaatttgaagattataaacagatcaacttcctgaaaaacacaaataatggcacccgcttggaggaattcttgcgtagcaccttttattctcggaagtcatttctgaaactgtttaacgagtttccggtactcgcgcgggtttgcaccgtacgtacgatctatttgatcaataactttagtgctatcatccagaacatcaatagcgactacctggaaatccaggaatttctgaacgtcgatttcctgaacttgacaaacatcactctttcgacgggtgattcccacgaacagggtaaaagtgtgtccatcctctattttgatgaaaaaaagctgatttataaaccgaaaaatctgaagatttcagaaattttcgagagcttcatcgactggtacaccaacgtctctaaccataagctgctcgacctgaaaatcccgaaaggaatttttaaagacgattacacttataacgaatttattgagccaaactactgcgagaataagcgcgaaattgaaaattactataaccgttatgggtacctgatcgcaatctgttatctgttcaacctgaatgacctgcatgtagaaaatgtgatcgcccatggcgagtacccggttattgttgatattgaaacgagctttcaagtccctgtgcaaatggaggacgatactttatatgtgaagctgttgcgcgagctggaattggaaagcgtttcatcgtcgtttctgttacctaccaatctgtcgtttggtatggacgataaagtggacctgtccgcgctgagcggaaccatggtcgagctgaatcagcaaattctggcgcctgtcaacattaatatggacaactttcattacgagaaatcaccgagctattttccaggcggaaacaatatccctaaaaacaacaaatcagtgactgttgattataaaaaatacttgctcaatattgtgactggtttcgacgaatttatgaagtatacccaagaaaatcagctggaatttattgagttcctgaaaaaattctcagataaaaaaatccgggtgctggtgaagggtacggaaaaatatgcgtccatgattcgctacagcaaccatccgaactacaacaaagaaatgaaatatcgcgagcgtctcatgatgaacttgtgggcgtacccttacaaagacaagcgtattgttaatagcgaagtacaggacctgttatttaacgatatcccgatcttttactcctttccaaatagccgtgacctcattgatagtcgcggcttggtgtataaagattaccttcctgtgacaggactgcagaaagcaattgatcgcgtgaaagatacctcggtaaaaagcttgttcgaccagaagctgattcttcagagtagcttaggtctgtgggatgagattctcaacaagccggtccagaaaaaggaactgctctttgaaaagcagaactttaactatgtgaaagaggcgatcaatattgcggaattgctgattggctatttaatcgaaacggacgaccagagcaccatgctgagcattgattgttctgaagataaacactggaagattgttcctttagacgaatccctgtatggtgggctgtccggcattgcattattttttctcgatatttataaaattaccaaagatgaaaaatattttaattactatgataaaatcatttccacggccattaaacaatgtaaagcgaccatcttctcgtcaagcttcacgggttggctgagtcccatttatccgttgattctggaaaagaaatactttggtaccatgaaagataagaaattctttgactacacgatggaaaagctgtcgaatatgactgaagaacaaattaacaacatggatggtatggactatatcagtggcaaggcgggtattgtcaaactgctgattagcgcgtaccgggaatcgaagaacaatgaaaacatcggactggccctgagtaaattcagcaacgatctgattcaaaatattggcaccggcaaagtcagtgaattacaaaacgtgggcctggcgcacggcatttctggtattatggtcgtagtagcctcactggacacgtttaaaagtgaatatattcgcgagcagctggcaattgaatatgagatgttctgtttgcgtgaagattcatacaaatggtgttggggcatctctggaatgattcaagcccgtctcgaaattctgaaactgagcccggagtgtgtggataaaaaagagctgaacttgcttattaagcgttttaaaaacatcttgaatcagatgattaacgaagattccctttgtcacggcaacggttcgatcattactacgatgaagatgatctatatgtacacccaagacaccgagtggaactctctgattaatctgtggttatcaaatgtaagtatctattcgaccttacaaggctatagcattccaaagctgggcgatgtaacaattaaggggttgtttgatggcatttgtggtattggctggttatacctgtattcgaactttagcattgaaaacgtgctgctcctcgaggtctaataa

SEQ ID NO: 690 - DNA, 3090 bp, Artificial Sequence
  Synthetic
agagacgggcggccaccaggaggaacgagaatgatcaaaaatgtaaacctcaaagaggccattaaaggtttgaccgtatcagaacgttatgacactctgaaaaattcgggagtcaacctgaatctgaacatttcggctttggaagagtggcgcaaccgtaagaatcttttagccgatgaggactttacggagatgctgacggtgctggaatatgacccggtgtattttagccacgcgattaacgagaacatcgaagaacatatcgatatctacaagagcaaaattctgggggaaaactggtttatcgtgctgaacgatattctggacgagctcgataatcccatcgaatacaagaaagagatgaatcacagctacctcctgcgtccgttcttgctctacgccgaaaaggagatgaacaaatacattgtcaatcgtaaggagttacttccggtggaaccccaggtcatccaacagatcatggaaaatttggcctccaaactgttcgccgtttctgtgaaaagctttgtcctggagctgaatatttcgaaattgaaggacgaactggccggcgaaacaccggacgaacgctttcactcatttattcgtttgatgggtgagaaaacgcgcctggtggacttttacaacgaatatatcgttctgagtcgtattctggtgaacatcacgatcttattcgtcaacaacattattgagctgtttgagcgcctgcaggaatccaagctggatattgttaagaaacttggcgtgcaggaggagttcaaaatcagtaatattagcattggcgaaggtgatacacatcagcaaggacgctcggttatcgttcttacgttcgtgagtggaaagaaagtggtgtataaaccaaaaaatctgaaagttgtttctgcttataattctttaattgactggatcaacaataaaaataatattctgaaaatgccttcgtataacacattgatttatgatgatttcgtgatcgaggagtttgtcgagaaacgtgactgcaaaagtatcgaggaggtcaaaaaatattatattcgttatgggcaaattttggggattatgtatatcttaaatgggaacgattttcatatggaaaacctgattgcctcgggtgaatatccgatcattgttgacttggaaacgctgcttcagaacattatcaattttaaaaacaaaccatcagcggacttgatcaccaccaaaaagatgcttaacctggtaaacagtactctgctgctccctgaaaaacttctgaagggcgacatcacggacgaaggaatcgacatgtcagccttggcagggaaagaacaacacttggaacgccgcgaataccagttgaaaaacctgttcaccgacaacatggtttttgatctcgaaaaagtgaaaatcgaaggtgcgaacaacatcccgaaattaaacggtgaaaacgttgactacagcacctatattgatgagattgtggttgggttcgaaaatatctgtaacctgttcattcaatatcgcgacgagttactgcattccggcatcctggaggagtttaaagatgtgaaggttcgtcatgtgcttcgcaatacggttgtttatgctaagatgctggcgaatacatatcatccagattacctgcgtgattcgttgaatcgcgaacaggttcttgaaaacatttgggtgcatccgtttgagcgcaaagaattcattaagagcgagatggaagatatcctcaacaacgacatcccgatctttttctcatacgcgtcgtctaaggatattatcgattcgaatggcaaactgcacaaaaacgttatggaaatttcgggttacgaacgttttaccaccaaactgaaggaactgaatccctttctgattgaacagcaggtgagcgttattaatattaaaaccggccgctatggggataagaaattcgaaaaaaattatagcgtgcgcgacgttgcaacggagaaaaaagataatccgattgatttcctgcaggaggcaatgaatatcggcgataaaattttggaacatgctatcatctgtgatgagaccaaaacgatttcgtggcttaccattaacaaccatcatgataaaaattgggaaattgggcctatttccggtgaattttatgatggtctggcgggaatttcactcttctaccactacctctataaaaaatcccacaatgtcgagtataaaaaaattcgtgattacgcgttcaacatggcgaaagtcaaagccctgtcactgaaatacgatagtggcttgaccggttacgcttccttgctgtatacggcacacaagattgttcaggatgaaccgcggaagcaatacaaagacgtgatcaacgaagtgttcaagtacattgatgagagcaaagtcgtgaccgctaagtataactggttgcatggcactgcctctattattcatgtgttattgaacctctacgaggactctcgtgatatggcgtacctgactaaatgtattcagtacggcaaatatttggtcaagcaaatcaaagaacacaaggatatgcttgcgcctggctttagccagggcatctcttcggtcattatggttctggtgcgcttaagtaaaaagtgtgaagtcgaagaatttctcgaattagctctggaattaatggaaatggaacgcaacaaactgggaaacctttctgaatcaaactggctgaacggcttggtgggcattggcttatcacgtatcaaactgaaaggactggattccaacttacaggtcgacaacgacatcgaactcgtcctggatggcgtcatgaacagcttgtactcaaaagatgatactttgagctgtggtaactctggcacagtggaattgttcctgagtctgtttgaacagacgaaaaagaaagagtatctggatatggcgaaagcaatctgcgggaaaatgatcgaagagagtcgcatctcctttgagtatcagacaaagagtctgccgggtttagaactggtgggcctctactctggcttagccggaattggttatcaattcttacgtatctcggacgttgaggatattgcgagcattgctaccttagattaataa

SEQ ID NO: 691 - DNA, 971 bp, Artificial Sequence
  Synthetic
agacgaatataaggaataaaataatgacgaatttagacacgagcattgtggtcgtaggaagtccggatgatcttcacgtccagtcagtgacggagggtctgcgtgcacgcggtcacgagccttacgtgtttgacacccaacgttttccggaagagatgacagtgtcacttggtgaacagggtgcctctatttttgtcgatggccagcaaattgcacgtccggcggcggtgtacctccgttcactgtaccagagccccggcgcgtatggggtggatgccgacaaagcgatgcaggataactggcgccgcacattgctcgcttttcgcgagcgtagtaccctgatgagcgctgtgcttctgcgttgggaagaagcggggactgcagtgtataattcgccacgcgcgtcggcgaatatcactaaaccgtttcagctggcgctgctgcgcgacgctggtctgccggtaccacgtagcttgtggacaaacgaccctgaagcagtgcggcggtttcatgcggaagtgggtgactgtatttacaaaccggtcgccgggggagcgcgtacacgcaaactggaagcgaaagatctcgaagcggaccgcatcgaacgcctgagtgcagcgccggtgtgttttcaagaactgctcacaggagatgatgtgcgtgtttacgtgatagatgaccaggtaatatgcgccctgcgcatcgtaactgatgagatcgatttccgccaagcagaggaacgtatcgaggccatcgaaatttcagatgaagtaaaagaccaatgtgtacgtgccgccaaacttgttggcctgcgctacaccggtatggatatcaaagccggcgccgatggtaactatcgtgttctcgaactgaacgcgagtgcgatgtttcgcggtttcgaaggccgtgcgaatgtggatatctgtggaccgctgtgtgatgcattgatcgctcagaccaaacgttaataa

SEQ ID NO: 692 - DNA, 1003 bp, Artificial Sequence
  Synthetic
agaggctatataggataggggggtccccatgaacgttctgattataacgcattcccacgataacgagagcatttcattggtaacccaagccattgaatcccagggtggtaaagcatttcgcttcgataccgatcgttttccgacggaagtccagctggacatctattactcaaatacagagaaatgcgtgctggtggctgacgatcaaaaactggatttaaatgaagtaaccgcggtctggtatcgccgcattgcgatcggtggcaaaatcccgcccacgatggataagcaacttcgtcaggcctcgattcaggagagtcgtgctacaattcaaggcatgatagcgagcattcgcggctttcaccttgacccagtgccgaacattcgtcgcgctgaaaataagcaactgcagctgcaggttgcccgcaaaatcggactggataccccacgcactctcaccactaataatccgcaggccgtgaaggaatttgcggcagaatgccagcaggacgtaatcaccaaaatgctgagtagttttgcgatttatgatgagaaaggcggagaacaggtggttttcaccaatcccgtgaaatctgaggatctggaaaatttagaaggtctgcgcttttgccctatgacgtttcaagagaaaatcgcaaaggttctggagctccggatcaccatcgtgggtaagtcaattttaacggctgcggtgaattcacaggccctggacaaatcccgttatgattggcgcaagcagggcgtagcattactggatgcatggcagacccatacgttaccccaggacgtggctgataaattgcttcaactgatggcccatttcgggttaaactatggagccattgacgtgattctgaccccggataatcgctatgtgttcttggaggtcaatccggtgggcgaattcttttggcttgagcgttgcccaggtctgccgattagtcaagctattgctaaagtgctgctttctcatatataataa

SEQ ID NO: 693 - DNA, 2418 bp, Artificial Sequence
  Synthetic
agagctgttagtcgctgccaggaggtcccgtatgtacgagctgaatgatggcgtaggtttggccctcgtggatcagcatccgatttttctggacctgaaaacagaccgttacctgtcgttgagtccagatggggcagcagtcctgctgggagcagcgccagccaccaaagagagtccactgtttctcggattagaatccattggcttggtcaaaaacggtccgtcaggccttaagccttgccaaattgccgtagccactgggtctgcaccgccccgtaaggtgcaattcgagtcgttgtcactcctgcttttgcgcttaattcgtgcacgtctggatcaacgtgctcttttgaagcgtgtgaccgacttaaagaaggccggcaccattgcccagacgaagaaccgtgactgcgccttgtcattattaggtagcgtggagactgaggcaaaggcttgtcgtacccttttaagtagtacagacaaatgcctgcccgacgcattcgcaattgcaacgcacctgcgccgtcgcggagtagacgccaagttagttttcggtgtgcgcctgccattcgcggcacatgcctgggtccaggtagatgatattgtagtgggtgatcgtcccgaccgtatccttgcgttcacccccatcttagtcgtttaataacttttaacatcccttctcataaggaggttttaatgcgctatgtcgcgtctttctttgttcgcggacatgtcagcacaccagcactgcgtcacccagagccaaagggtttcgcttatgcaaaagtcagtggcggactgagcgtatggagcgatgcgccgattcgtcaccgtgcgccccttattacagtgggcgcggtgttcgatcgcgcgtcttttaaagggctggattgcgacttatcaggtctgcgtcaggatggtcttaatacattgaaagcggaaacgttcggaccctacctggcgttagaggttgccgataacggcacccttcgcgtttatcgcgatccgtcaggcggcgcgccttgctattacctgcagaccgaggacggcttctggcttgcaagcgatgctgatttgttattcactcattcgggcgtacatccatcagtaagcttaccgggactgattgaacacttgcgtcgtccagagttccaaaatgagggcacatgcttaaacgtcaagcaagtacgccctggggagcaggttgatttatcgctctcgggcgaggtccgtgcctgtttgttcccgcctgcatcatccctgcgcccgcctgagttgcaccgcgcatacgatgacattaaggctgagctgcgcgctctgattttacgcagcattaaggcctatgccagtgatttccctcacgttgttgttagcttcagcggtggtctggatagcagtgttgttgcggccggcttagcgcaaacttccactaaggtcctgcttcacacctttaagggcccagatgccaaaggggacgagactgccttcgccgcagaatgcgcggcatatctgggtttaagcttagagattgatactctcagtatcgatgacgttgatctgtcggcaactatttccccgcacctgccgcgccccagcacatcattcttcttgccatcactgctgcgcggtttctctacctcgagccaaacgcgcacaggcggggcaatcttttcgggaaacggcggtgactcggtcttttgtttcatgcatagcgcgaccccgctggccgatttgatgtgtcgtccgtcaggtcttacgccgttcatgcaaacatgggccgacgtgcaaaagcttacccgtgcctcagcgaccgaagtgctgcgtcgcgcgttaaagacagccatggcgcgtggctacatctggcctgaatccaatctcctcttgtcccgcgacacaagctcgagccgtttaacacctgactccgttctgtcgagccttgaggggattctgcccggtcgcttgcgtcacctcgccctgattcgtcgtgctcacaacaccttcgagccattcgccccttggcgtacgccgccagtcgttcaccctctcatggccaagccgattcaagccttctgcctttctcttccttcatggatgtgggtcagcggtggtaaagaccgctcgctcgtgcgtgacgcgttcgaaggattacttccagattcagtgcgccttcgtaaatcaaagggaagtcctgcaggctttctgcatgcgctgtaccgcgccaagggtcgtcaaatgattgagcgtatccgtcacggttacctgcgtcgtgaggggatcatcgatatctctactggcccggacgcattgttctcggaagggttccgcaatccgcgtgtaatgcaccgtttctttgagctcgccgcaactgaggtgtggatcgatcactggcgcaactggcgccgcccccgcacataataa

SEQ ID NO: 694 - DNA, 2447 bp, Artificial Sequence
  Synthetic
agacagtagtataaaggagggttcaagtatgcctttatggttagcgcaggacgtccacgcggtcgctctggacgaagatatcgtggtgctggatgcggtgagcgacgcatacctgtgtttagttggtgccagcgctctgatcagcttgggcagcgagcgttccgtcagtgcagatccggtggccgctgagacacttcgtgaggctggtctggtgggtccacatcctagcggcgccacccgaccaatacctccgaagccgacgattgacttacctgatgcagcccgtcaggcgcaaggtcgtgaattacgtgccgccgcgtgggctggcgcggcaaccgcaatcgatttccgccggcgttcatttagacaactcctcgcgagagcagggcaacgcccgccgggtcaagcagctgctccggctgatgaggtattggcagcagccgcagtgttcatgcggttacgtccatggtcacccgttggaggcgcgtgccttatgcgttcgtattacttattacggcatttgcgcatcctcggtttcgatgccgattggatcattggtgtgcgtacgtggccatttatggcccattgctggctgcaggtcggtgccgtcgcactcgacgatgacgtcgagagattaacagcatacacaccgattctggcggtgtaataattcaataaattaaggaattttgatgggcgactacctggctctgtactggccgcgcggcatgcccggtgtagctgcagacgcaatgcgggccgccatcgaagctgagggcgcctggaccctggcgttcgaggcctaccagctggtagtgtatgtcaaagggccccgagcacctaaagtgcgtgccctgccggatcagggcggggtggtcattggggaactgtttgatactgcagcaacccgcgaaggacgcgtgcaggactttcctatagcgctgatcaaagacgtcgcagctcaggatgccgcacgtattcttgctacccatgcgtggggtcgttatgtggctgtattaaaagccggtgatcgtccgccatggatctttcgcgatccaagcggggcggtggaatgtctggcgtgggtccgcgatgaagtgaccatcattagcagcgatgttgcagcgcaacgagcttggtcccctgatcggctggcgattgactggtcgggactgggacgtgtactggcacgcggaaacttatggggagaaatttgcccgctggctggcgtcacggcgattgcgccaggtaccgcacggtgtgatctcggtgatgcagctctgagcctgtggcgcccaggagatcatgcacgtcgtagtcgtcatgatgtttccccacgtgatttggcaagagtggtggatgctagcgttgcagccctggctagagatcgcagcgctattctggtcgaaatcagcgggggactggattccgctatcgttgccacgtcgctggctcgttgtggagccccagttgttgctggaattaaccattactggcccgaaccggagggtgatgaacgtcgctgggcccaggacatcgcagatcggtgcggttttcgcctgatcgcgggccaacgtcagcggctgttgctggacgaggcaaagctgctgagacatgcacagggcccgcgacctggtctgaatgcgcaggacccggacctcgatcacgatctggcggaacaggctaaagcgttgggtgccgatgcactgttctcagggcaaggtggcgatggtgtgttctatcaaatggcaaatgctgcactggcagccgatatcctcatggggaaacctgctcctatgggtagagccgcgtctttagccgctgtggctcgtcgggcacgagccacggtctggagtttgtgcggccaggctatgtttccgtcgcgcgcatttgccgctggtatgccgccgccaagtttcttgagcgccggtttggcgccgccacccgtgcacccgtggattgcagaccagcgcggtgtttcaccggcgaaacgtattcaaattcgggggctgaccaatattcaatgtgctttcggcgatagcttacggggccgagcagcagatcttttatatccgcttatggcccaaccggtcatggaactgtgtctgtctatccctgcaccgctgttggcagtaggcgcattggatcgccctttcgcacgtgcggcgttcgcagatcgattacctcctcgttcactcgttcgacgctcaaaaggtgatgttaccgtgtttttcagcaaaagccttgcagcaagcctgccggcccttcgtcctttcctgctggacgggcgccttgcagaacagggtctgatcgatcgagcaaaactggaacctctgctgcaccccgaaccgatgatttggcgcgactcagtcggcgaggtaatgctggcagcgtatcttgaagcctgggtgcgcgcatgggaagccaagttgcgtgttagctaataa

SEQ ID NO: 695 - DNA, 2445 bp, Artificial Sequence
  Synthetic
agaaccactataaggaacgatttatgactctgacctggcgcccgggtgttcacgcggtaatggtcgaagatgatctggttctgctggatgaagcagcggacgcttatgtctgtttgttggatggcgccaaagtggttagcgtccgggctgacggtgctctgagcttcaatcccccacatgcagcagaagatatgatcgcgggtggcctcgtcgaaccttcatcaagtgccgcggcgtcagcaaacccgccggcaaaactcccatgtactccgctggcgcgcttatcgcgcccgcggcatgtaaaagtgcgtccggctgaagcggccttgttcctgatccaagcctggggtgttgcgcgtgcggtacgtcgttggccaatggctagattattagaagcattacgtggagatcgtgccgcagaaccggcgaaaggccgccgatcgatggcggaggcgtgcgctgtttttgatgcgcttctggcctggagcccttttgacggtgaatgtttgtttcgctcagtattacgacgtagatttttaatggcactgggccattcgccggacttggtgataggcgtgcgtacctggccgttccgcgcacattgctggctgcagagcggagtggatgccctggatgattggccggaacggctctgcgcatatcgcccgattctggcagcttctgcaagccagggtagataataacagtataactagaacaacaaggagtcagataatgagttacctgctgatgacctggccgccggggcagccgagcgtagaagctgatgcacttcacgcagcctttaacgggcagggtggatggagcctggttttggaacgattctgcctgcgcgtatacgtgcgtggcgcggcagcccctgcagttacccttaccccgaaaggaggcgtgctcattggtgagatgtttgatcgggctgccacagaaacgggcgccgttgccgcttatgatctgagccgcctgggagatgacgacggtatggccgtagcccggcgtgtggtggacgaagcgtgggggagatatgtgttggtgctgccagttaaagaacgccgtccagtggttttgcgagaaccactgggcgcgctggatgcgctgatctggcgcaaaggcgatgtctggtgcgtgggggcagacgtacccccgggtcttgaaccaaaagatctgggtgtggaagagactagactgacgcacctgatcgcggaaccggatctggcatctgcgagcctgcccttaaccggcgtcgcggcagtgatgccaggtactgcggtcgatgaaaccggccaggtgcaccgtctgtggacccccgcgcgttttgctcgctcccctcgcactgacgcgtggactgcagccgaacgtattccgctggttacccgtgcgtgcatcgcggcgctgtctgcgaatcgaagtggtattctgtgcgagatttcgggcggcctggatagcgctattgttgcgacctctctgaaagcggaaggtgcgaagattagtagcgggatcaacttccattggccccaggctgaagcagatgagcgcccgtacgcacgcgctgttgcgaaaagcgtgcgaacccggttacaggtggtagcgagtcgtgtagcgcccgttgacccggaaacgtttgatgagatcgtggtcgcgcgaccaagttttaatgccattgatccagtctatgataccgtactggcccaacgtctgattcagggcggtgaaggagccctgtttaccggacaaggtggtgacgcagttttctatcagatgccagcaccacaactttcgttggatttgttggctcgtggcccccgccgccgcggtcttatgggattatcacgccgcaccaaccgcagtgtctggtcgttgctgcgcatgggcttacgtgcacccgtacgagcaacctttccctacggtgcgagaggtgccgatcgtcctccgatgcacccgtggctggaggacgcgcgtggtgttggggccgcgaaacggattcagatcgaagcgctggttgctaaccaggccgtgtttgaagcatctcgtcgcggtgcggcggctcatttggtgcacccactgctgtcgcaaccgcttgtggagctgtgcctttcaaccccagcggccgtgctggcgggtgccgaacaagatagagcattcgtgcgtagcgcttttcgtgcgcaactgccacgcctggtcttagatcgtcaaagcaaaggagatctgagcgttttctttgctaaaggtgtggcgcggagcttgccgggcttgcgtccgcgtctgctcgaaggacgcttagcggcacgtggcctgatcgacgtggaagcgttatcacaagcgatgcagccagaagcgatgatttggcgtgacggttcggccgaaatcctgtgccttgctgttctggaatcatggctccgctcttgggaggctcgtggtgcataataa

SEQ ID NO: 696 - DNA, 2450 bp, Artificial Sequence
  Synthetic
agatcccgataaaggaggtcctaatgcgcgttgcagtgccggatcatttagcgtattgcgtaaaacaaggtggagttacgtttctggacgtccgcggggatcgttacttcggcctgccgccggtgctggaacacgcgttcgttgccattgccgaggcggattttctgctgaaagaaccaaattcacttctggagccactcgaagcactgggtgtcttagtgcgaggccaagcccgccgtgccgatctgacaattccgtctgcaaatctgtcatgggtggatgaggtcagcccgaccccaccacgtcttgaccctgcgtcactcgtcgcaaccgtcacgtctgttattcgaacgcgtctgagccaaaagagtaagtccttgcaggctctcttggaagaggtccgtacccgccgtccgggatcgccggcccataattggcagctgatgcgtcgtctgacggctggattccgtgcatcgcgtgcttgggcgccgatagaacccatctgcctcctggacagcttggcgttactggattttctgcatcgccgtggcctgtatccgcatattgttttcggtgtgatccgccaaccgtttgccgctcattgttgggtgcaagctgatgatgtagtcctgaatgaccggctggatcatgtcggtgaatatacaccgatcctggtggtctaataataacataaggagggtttctaaatggaagattacgtggtcctcatttggccggcactcgctgaagctcctgcacgcgacttgattcgtcgcctgccgaaactcaaaaccgtcattgaaactagcggattggtggtactgcgccccgaaaatggtgcgggtctgcgggtaggcgggaacggtgtggtcctgggtagcgtctttcgcaccggcggtgatcgcgaaactgttgcggaattttcggaatcggaagcatccgcgatcgccacgagtcgtggtcagcagttagtgacagagttctggggtggctacctggctgttcttggagatgcttcgcgttccgaagtgatggtcctgcgagatccttcaggtgcaatgccggcttattgtttagttcatggcgaagtccagatcatctgctctcgcttggaggtcctggaggacgcaggactggggcagcaggcgctgaactgggacgtggtggcgcaattactggccttcccaaaccttcgaggtcgctcaacgggtcttaaaggcgtggaagaattacttcccggttgccgtctgacatttacgggaggactgaaaaccgaaacgctgacctggaacccgtggctttttgcccgcccatctgcgcaagcgcctgaacgtggagttgcggcgaccgccgtgcgtcaggcggtggaagtaagcgttcgaaaatgggctgatcagagttcaccggtacttttggaattgtcaggcgggctggatagtagtatcatcgcctgctgtctggacgaaccgcgcaccgcggccaccttcgtgaactttgtcacaccgacggccgaaggcgatgaacgaggatatgcacgtctggttgccaaggcagcagataaacaactgatcgagcaggacatccgggctgacgaagtagatgttacccgtccaagacctggccgccatcctcgtccggccagtcaggcgctgttacagccgctggaacaggcttgcgctgaactggcacctcagttgggtgcgagaagtttcttctccggtctgggaggagacaacgtgttttgtagcattgcaaccgcaagcccggctgcggatgcacttttgactagcggtctgggccgacagttctgggccgcaatcggggacctgtgtgcacgtcataactgcaccgtatgggcagccttaagcgccacgctgaagaaactgctccgctcagatcgtcgtctggtgatcaaaccaaacctggattttctgtcctttcgggaggacgccatagaccgtccggatcacccatggcttgaagtggccgccgatcgtctgccggggaaacgcgaacatgtcgcaagcattctgttggcgcaaggcttcctggatcgttatgagcacgctcaggttgctgccgtccgctttcccttgttaacgcaaccggttatggaggcttgtctgcgcgtgccgacctggatggcaaaccaccagggtcgcaatcgggcggtcgcacgcgatgccttctttgatcgcttgcccccgagagtacgtgatcggcagacaaaaggaggtttgaacgcgtttatgggtgttgcgttcgaacgcaaccgtcaggccttagctcgtcatctgttagacgggcgcctggtacagcgtggcctgatagatgcagtggcaataaaatcggcgctggcctcaccagtcctggaaggaggagccatgaaccgcttactgtacctggccgatgtcgaatcctgggtacgctcatgggaagatgtgtaataa

SEQ ID NO: 697 - DNA, 2572 bp, Artificial Sequence
  Synthetic
agatcactgcaatagtaaggaggtatataatggacctgtggttgagcgccggggtctatgctgtcatgatcgatgatgatgtagttttcctggacgtcgccaccaatgcatacttctgcctcccagccgttgggagcgtgttggcactcgaaggtcgttcgctgcgtgtggcggctcgcgaactggcagaagatcttattcaggcaggcttagcatccgcggctgcggcaatcgaacccccaccgagcacaccagccccagttcgcactgcgcgtgcggtattggaagctctgccggcgcgtgaaagaccacgtccacgtcttgcccactggcgtcaggcgattatggctggcttggcgtcccgtgccgctgaacgtcgaccattcgcgcagagactgccgccgccttcaacgggggtttcacctccggcatcagaaggcctgcttgccgatctggatgcgttccgtcgacttcagccatggttgccgttcgacggtgcttgtctgttccgtagccaaatgctgcgcgattatctccttgcgctgggtcaccgcgttgactggattttcggtgtacgtacgtggccgtttggtgcccactgttggttgcaggccggcgacctggtgctggatgatgaggccgaacgtctgattgcgtatcaccccattatggtacgttaataaagcaccgaggggtcaataataaggaggtaaacatggggtatgccgcattgacttatccgggtggtttagcggcagcagcgtttgatgagatggtagaagcactgatcgatgctggatggaccttggcgttgcgtgcgttcagactcgccgttctcaccgatggtcaggctccagccgtgtcgccgctgatgggcagaggcggcgtagcaggcgttctcatcggcgaagcgtttgatcgtcgcgccacattaggtggcgcggtcgcacgtgccgcgctggatggtttggctgacatcgatccgctggaagcaggtcgccatctgattgaaaccgcgtggggcggctacgtgggtatgtggattggtcgggccgaagctggtccgacactgctgcgcgatcctagtggcgcgctcgaagccttagcgtggcgccgtgacggtgtaaccgttatgtcagcgcgcccgttgacggggcgcgcaggcccagctgatttagcaatcgattggccacgtatcgtgcagattctggccgatcccatttccgcggctctcggcccgccccctctgactggcttagcgaccatagacccgggcgcggcggttcatggcgcggatggccaagaacgctcagtgctgtggaccccagctgcagttgtccgtggtgctcgtcaccgtccttggccaagccgtcaggatctgcgtcgcaccatcgatgcgactgtcgcggcactggcctcggatgcgggcccgattgtctgcgaaatttcaggaggtctggactcggccatagttgcgactagccttgcggcgtccggtctgggtccgcagctgacagtgaatttttacggtgaccagcctgaagctgatgaacgcggatacgctcaagccgtcgccgaacgtatcggtgcgcctctgcggacccttcgtcgagagccgttcgcgttcgatgaaaccgtgctggcagccgctggacaggccgcacgtccgaattttaacgccctcgatcctggatacgatgccgggctcgtgggtgccctggaagctatcgatgctcgtgcattatttacgggccatggcggtgataccgtgttttatcaagtggcggccagtgccttggccgcagacttactgggcggcgcaccatgtgaaggtagccgccgtgcacgtttagaggaagtagctcggcggacccgacgctcgatttggagtcttgcatgggaagcgttttctggtcgacccagcactgtaagcattgaaggtcagttgcttcgacaggaagcagagagaattcggcgcgtcggcctgacccatccgtgggttggaggcctgtcgtctgtgacccctgcgaaacgccagcaaatccgcgcgctggtcagtaacctgaacgcgcatggcgccactggtcgcgccgaacgcgctagaatcgtgcacccgcttttagctcagccggtggttgaagcctgcctggcgattcctgcccctatcctcagtgcgggcgaaggagaacgctcatttgcgagagaagcctttgcagaccgtttgccaccgagcattgtgggccgccgaagcaaaggggaaattagtgtgtttcttaacagatctttagcagccagcgccccctttctgcgtggctttttacttgaaggacggctggcggctcgcgggctgattgatcgtgacgaacttgcagccgcgctggaaccggaagcaatcgtctggaaggatgcgtcacgcgacctgcttactgcggcggccctggaggcgtgggtcagacattgggaagcacgtattggcgagggggaagcagcggaaggtgagcgtgctgccggtcgtggtaccgcagcgacgggaccgcgtacaagcgcgcggaaggcgaacacccgttaataa

SEQ ID NO: 698 - DNA, 971 bp, Artificial Sequence
  Synthetic
agacaccgaaacctaaggagggatatatgaccgaacgtgccgcagtgcgtaccgaccattataaagcctttgggtttagaattgaaagcgatttcgtgctcccggaacttccgcccgcaggcgaacgcgaaccgctcgataatattacggttcgtcgtaccgacctgcagccgctctggaattctagtatccatttttacggaaactttgccattctggatcacggacgcacggttatgtttcgagttccgggtgctgctatctatgcggtacaggatgctagcagcatattagtgtccccattcgatcaggcagaagaaaactgggtacgtctttttattctgggtacctgtattgggatcatcctgctgcagcgtaagattatgccgctgcacggtagcgccgttgccattgatggcaaagcctacgcgattatcggcgaatctggtgccggcaaaagcactcttgcactgcatcttgtcagtaagggttatccattgctttcggatgatgtgattccggtcgttatgacccagggctccccctgggtggtgccgtcgtacccgcaacaaaaactttgggtggacactctgaagcacatgggaatggataatgcaaactatacgccgctgtacgaacgtaaaacgaagttcgcggtgcccgtgggcagtaatttccacgaagaaccgctgccgttagctagcattttcgagcttgtcccgtgggatgcggcaacgcacattgccccgatccaagggatggaacgctttcgtgtcctgttccaccacacttatcggaactttctggttcagccgctgggtcttatggaatggcattttaaaactctgagctcgttcgttcaccaaattggaatgtatcgtctgcatagacctatggtcggattcagtaccttagatttaacgtcgcacattctgaatataacgcgtcagggagagaacgatcaataataa

SEQ ID NO: 699 - DNA, 961 bp, Artificial Sequence
  Synthetic
agagcattccataaggagaaattttatgacgagaaccaacaccggctatcgttatcgcgcgttcggcctgcgcatagactcagatattccgctgccagaattaggggacggtacgcgccctgatggtgacgcggatctgacggtcgtccggtgtggggaagcggagccggaatgggctgaaggtggtggcgggggtcgtctgtatgccgctgaaggcattgtatcttttcgcgtgccgcagacggcagcgttccgtattactaatggaaatcgcatcgaggtgcatgcctactcgggggctgatgaggatcgaatacgcctgtacgtgttagggacctgtatgggagcgctgttactgcaacgtagaatcttaccgcttcatggttcggtcgtcgcccgtgatggtcgtgcgtatgccatagttggcgaaagcggagcgggcaaatccacgatgagtgcagcacttctcgaacgtggattccgcctcgttacggatgacgtggccgccatcgtgttcgatgagcgtgggaccccactggttatgccggcttatccacagcaaaaactgtggcaggattccctggaccgtctgcaaattgcgggctcgggccttcgtccgctgttcgaacgcgaaacgaaatacgctgtacccgcggatggggcattctggcccgaaccggttccattggtgcacatttacgaactggttcatagcgatggtcaaacgcctgaactgcagccgattgccaaattagagcgttgctataccttgtatcgccacacatttcgtagaagcctgatcgtccccagcggcttaagcgcctggcattttgaaacggcagtgaaacttgcggagaaaacggggatgtaccgtcttatgcgcccggccaaagttttcgcggctcgcgaatctgctcggctgattgaaactcacgccgatggtgaagtgtcacgttaataa

SEQ ID NO: 700 - DNA, 985 bp, Artificial Sequence
  Synthetic
agaggcggtattaagggggccagagatggcggatcatattgcggccggtcatgacaccgtcctgagcctggccgaacggacaggtaccgatccagatctgctgggccgtgtgttgcgcttcctcgcttgtcgtggtgttttcgccgagcctcgcccaggtacttatgccttgacccctctgagcttaactttactggaaggccatccgtccggtttaagagaatggttggatgcgtcgggtgcgggagcgcgcatggacgcggcagttggagatctgcttggcgccctccgctcgggtgaaccgagctatccacgtctgcatggtcgtccgttttatgaagatctggcgctgcacagccgaggccctgcttttgatggactgcgtcatacgcacgccgaatcgtatgttgccgacctgctggcagcctacccgtgggaacgcgttcgtcgcgtggttgatgtaggcggtgggaccggcgtattggtcgaggcgcttatgagaactcatgcgaccctccgtacagtactggtcgatcttccaggcgcggtggctaccgctaccgctcgaattgcggctgcgggttttggcaatagatatacaccggtcacgggttccttctttgatccgctgcctgcgggggcggatgtttacaccctggttaacgtggttcacaactggaacgatgagcgtgcctcagctctgctgcgtcggtgtgcggatgcgggtcgccgcgacagtacgtttgttatcgtggaacgcttagcggacgatgcagaccctcgtgccatcaccgccatggacctccgtatgttcctttttctgggcggtaaagagcgcacggccgcacagattcgcgaagtagctagtgcggctggcatggcccaccaaagcaccattaaaacaccgtctggcctccacttacttgttttccgtaagaaacgtttcgctgctcgcggtcacggtcgtcgcatggtgacctaataa

SEQ ID NO: 701 - DNA, 1430 bp, Artificial Sequence
  Synthetic
agactatcgataataggaggtagaccatggacggaaccaacaagcgcctggaggacaagtggtttgatattaacttcctggaaatgtatacacgcagctgcctgaaaacttttggctacttcgacgaaattctgatcgtgaagaaacgcatcgaggtcctgaagaacgtgcttgaaaaacagtacttgtctaccaatgattatgctgaggagtttttcgagctgaataccaccttggagagcataaaagaatacatcaaactgaatctggtcatcgagaaagaaccgatctcaatttgcattatggtcaaaaacgaagaacgttgcatcaagcgctgcattgatagcgttgaaatcctcgccgaggagataatcattatcgataccggctctacggataataccattaacattattgaggaatgcgcaaacgacaaaattaaagtgttctcaaaagaatggcgtaacgatttttccgaaattcggaactatgccatcgagaaagcgagtagcgaatggctggtgtttatagatgccgatgaatatctggacgaagcctcggtgctcaacctgctcagtacgctcaacatctttaacaatcataagctcaaagactctattgtcctgtgccccatgatcaacgaagccaataacaccatccatttccgtaccgggaaatttttcagaaaagactccgggattaaattctttggtacctgccatgaggagccccgcattaaaggcatgccgaattctaccctgctgattccgatcaaggttgattatctgcatgacggctacctggcaaaagtacaatcaaataaagacaagaaaacccgtaacatcgaactgttagaaggtatggtggaactggaaccggataatcctcgttgggcgtatatgtttgtgcgcgacggatttgcaatcctcgataacgaatacattgagaaaacttgtttgcggtttttactgctggacaaaaacgtacgcatctgcgtcaacaacctgcaagaccataaattcactttgtcactcctgacgatcctgggccgcctctatctgcgcgagtgcgaattcgagaaaagcaatctgataattcgcattcttgacgaactcatccctaatagtctggatggtaaatttctggcattcatggagcgattcagcaaactgaaaattgagattaatacgctgttaacggaggtcatcgaatatcgtcgtaaccacgaagtagatgaaaccagtttaatcaacacacaaggctaccatatcgactatgttctgtcgattttgctgttcgaaacgggtaattacgcgcaaagtaagaaatacttcgatttcctgcaggagaaccattttctggaagaactgtttcaagacagctcttattctatcatactgaaaatgctcgagtcagtagaagattaataa

SEQ ID NO: 702 - DNA, 1327 bp, Artificial Sequence
  Synthetic
agaccaaacaattaggaggacaaatatggggaatttgcgtgatttctaccaactgatgaaagataactatgcggactctaatctgttcaaggatttgaatctgatccacaatatctccaacgacatccaaattggaattaattgcgatttctctgaaatgctgggagaactggtaggtaattacgattccctgaactatccgtcaatcacctgtggtattctgacgtataatgaagaacgctgcattaaacgttgtctggaaagtgtggtgaacgaattcgatgagattattgtcttggatagtgtatccgaggacaataccgtgaaaattatcaaggagaatttcaacgatgtcaaagtctacgtcgagccatggaagaacgatttttcatttcaccgcaacaagatcattaatctcgcaacgtgcgactggatctactttatcgacgcggataattattatgattcgaagaacaagggtaaagccatgcgcatcgctaaggttatggatttcttgaaaatcgaaggcgttgtgagcccaacggtcattgagcatgacaatagcatgagccgtgatacccgtaagatgtttcgtctgaaagataacattctgtttagcggtaaagttcatgaagaaccggtgtatgccaatggtgagatcccccggaacatcatagtagacatcaacgtgtttcacgacggctataacccaaagattatcaacatgatggaaaagaacgagcgcaatatcaccctgactaaagagatgatgaagatcgaaccgaacaatccgaaatggctgtacttctatagccgcgaactctatcagacgcaacgtgacattgcccttgtgcaaagtgtactgttcaaggcactggaactgtatgaaaacagttcatatacgcgttattatgttgacaccattgccttactgtgccgagtgctgttcgaatctaaaaactaccagaaacttacggaatgtctgaacatcctggagaacaatacgcttaactgttccgatatcgattactataattcagcgctgctgttctacaacctgttactgcgcatcaagaaaattagctccaccctgaaggagaacattgatatgtacgaacgtgactatcatagctttatcaacccctcgcatgatcacattaagattctgatattaaatatgctcctgctgctcggcgattaccaggatgcctttaaggtttacaaggagatcaagtccattgagattaaagatgagtttctggtgaacgtgaacaaattcaaagacaatcttctgagcttcattgactccattaacaaaatttaataa

SEQ ID NO: 703 - DNA, 2754 bp, Artificial Sequence
  Synthetic
agaaaaacgaggaggtaatagatgacaagccatgcaaccgaggttgaatgggaggaccttctgcgccaagcattacacgcaactggtacaggtgctcgttgggctgtagaggcggacgagatgtggtgccgtgtcgccccggtgcctggaactcgccgcgagcaaggatggaagcttcatgtaagcgcgacgaccgcgagtgcgcccgaagtcttaactcgtgcattaggcgtacttctgcgtgaaaagtccgggttcaaatttgcccgctcacttgaacaagtctcggccttgaatagtcgtgctacgccccgtggtagttcgggtaaatttatcacagtatacccccgctcagacgccgaagccgtcgcactggctcgcgacctgcatgcggcaacggccggcttggctgggccccgtattctttccgatcaaccatacgccgcgcacagcctggtgcattatcgttatggggctttcgtgggacgtcgtcgcctttcagatgacgggcttttagtttggtttattgaggacccagatggcaatcccgtggaggataaacgcaccggacgttatgcgccgcctccctgggctgtatgtccgtttcctgcgagcgtccccgttgcgccccatgacggcgaagctacgagtcgtcctgttgtcttaggtggtcgcttcgcggttcgtgaagccatccgtcaaacgaataaagggggcgtctatcgcgggtcggacacacgcactggcaccggcgtggttatcaaagaggcgcgcccacatgttgaaggagacgccagtgggggcgatgttcgtgactggcttcgcgcagaggcgcgtacgcttgaaaaattaaaaggtaccggcttggcaccagaagcggtggcgttgtttgagcacgctggccacttgttcttagcccaagacgaggtcccgggggttacgttacgcacctgggtagcggaacacttccgtgacgttggaggagagcgctatcgtgccgacgccctggctcaggtggctcgtttagttgatttagtcgcggctgctcatgcacgtggcttggtcctgcgcgattttacaccagggaacgtgatggtccgtccagacggcgaattgcgccttattgatttagagctggcggttcttgaggatgaggccgcattgcctacccacgtcggtaccccggggttttcggcacccgaacgccttgcagacgctccagtgcgtcctactgctgactactattctctgggagccacagcttgttttgtcttggccggtaaagtccctaatttacttcctgaagaacccgtgggtcgcccatcggaggagcgtcttgctgcctggttgactgcatgtacacgtccgctgcgcctgccagatggagtcgttgacatgatcttggggttaatgcgcgatgatcctgcagagcgctgggacccatcccgcgcgcgtgaagcactgcgcaaagctgacccgacagcacgccccggggatgctgatcgcactgcagtacgtcgtacgggttcgtcggcagtggccgggccagttcctgactcacgtacagcagatggtcgtacagcggacggccgttccgcggatgaagttgtggcaggtcttgtcgatcacttagtcgatagtatgaccccggcagatgatcgtctgtggccggtaagcactcttacgggagaatcggatccatgtacagtccagcaaggcgctgctggggtgcttgcggtgttgacccgctacttcgaattgacgggcgatccgcgcttaccaggcttattgtcgacagccggacgttggatcgcagaccgcacggatgttcgttcacctcgtccgggattacatttcgggggacgcggaacagcctgggccttatacgacgcggggcgtgcagtcgacgatcgtcgcttggtggaacatgctctggacttagcattagccccgccccaagcgactcctcatcacgatgtcacgcatgggactgcgggctcaggcttagccgccttgcacctgtggcagcgtactggagatactcgtttcgcggatttagcagtagaggcagctgatcgcttaacagctgcagctcgtcgcgagccttcgggtgttggatgggcagtacctgcagaggccgactccccagaaggaggcaagcgttacctgggcttcgctcatggcgcagctgggattgggtgcttcttattggctgcggcggaacttagtcgtcaacccgatcatcgtgcaactgctttggaagttggcgaaggcctggttgctgatgctgttcgcatcggagaggcggcacagtggcctgcgcaatccggggacttgccgacagcgccttactggtgccatggggcggcaggtatcgggacatttcttgtacgcttatggcaggcgaccggggacgatcgcttcggtgatctggcccgcgggagtgctcacgctgtggccgaacgtgctagtcgcgccccattggcgcaatgtcacggtttggctggaaacggagatttcttgttggatttggcagacgcgacaggcgatcctgtgcatcgcgacaccgcggaagagttagcagggttgatcttggccgaaggaacccgtcgtcagggacatgtcgttttccctaatgagtatggggaagtatcatcttcatggtccgacggtagtgcggggattcttgcgttccttctgcgtacgcgtcatacgggccctcgccattggatggtagaacaacgtgggtaataa

SEQ ID NO: 704 - DNA, 837 bp, Artificial Sequence
  Synthetic
agagccttccacaaactaaggagcacaattatggattatcatttcatcagcggactgcctcgtgcggggagttcattactggctgcgttactgcgtcaaaatccgcagctgcatgccgatgttacatctccggtggcgcgcctttacgcggccatgctgatgggtatgagtgaagaacacccgagcaacgtgcagattgacgatgcccaacgtgtccgtctgttacgtgcagtatttgatgcgtattatcagaaccgtcaggaactggggacagtgttcgatactaaccgcgcatggtgctctcgcctcacgggcctggcgcgtctgtttccgcgtagtcgcatgatctgctgtgtacgcgatgtgggctggattgttgattcttttgaacgcctggcgcagtcgcagccgttacgcctttcggccctgttcggttacgaccccgaggattcggttagcatgcacgctgacttactcactgcgcctcgcggggtagtgggctacgccctggatggtttacgtcaagcgttttatggagatcacgcggatcgtctgctgttgttacgttatgatacgctggcacagcgtcctgcacaagccatggaacaggtatatgcattcctgcagctccctgcctttgcacatgattatgccggtgttcaggccgaagcggaacgctttgatgccgccctgcaaatgcctggtttgcaccgcgtgcgtcgtggtgttcactatgttccgcgacgttcggttttaccgcctgccctgtttgaccagctgcaggaacttgcattctgggaaagtgcacccagccatggagcgctgctcgtgtaataa

SEQ ID NO: 705 - DNA, 932 bp, Artificial Sequence
  Synthetic
agaggaacgagaaataaggacacagatatatgaaggaaatcgtgaaacagaatatcagtaacaaagacctgtcgcaactcctgtgttccttcattgattcaaaggaaactttcagttttgccgagagcgctatactgcattatgtagtattcggcggtgagaacctggacgtagctacctggctgggcgccggaattgaaattctgatcctgagcagcgatatcatggacgacctggaggacgaggataaccatcatgcgttgtggatgaaaattaaccgcagcgagagcttgaatgcggccctgtccttatacaccgtcggcttaacgagcatctattccctgaacacaaatccgttgatatttaagtatgtgctgcgctacgtcaatgaggccatgcagggtcagcatgatgatataaccaataaaagcaaaaccgaagatgaatcgcttgaagtgattcgccttaaatgcggcagcctgatcgccctggcaaatgtcgcgggcgtgctgttagccacgggcgagtacaatgaaacagttgaacgttactcttattacaaaggcatcgtggcgcaaatttccggcgactatcacgtgctgctgtcaggaaaccggagcgatatcgagaaaaacaaacagacactgatttacctgtatctgaaacgcctgtttaacaacgcgagcgaggaattgctgtatctgttctcccataaagatttgtactataaagccctgctcgaccgtgaaaagtttgaagaaaaactgatccaggccggggtgacgcagtacatcagcgttctgctcgaaatatataagcagaagtgcttctccaccatagaacagctgaacttagataaagaaaagaaagagctgatcaaggagagcctgctgtcatataagaaaggcgacacccgttgcaagacctaataa

SEQ ID NO: 706 - DNA, 906 bp, Artificial Sequence
  Synthetic
agaacgcagacaatttcataggaggtcccgatgatcaattatgctaatgcgcagctccataagagtaaaaacttgatgtatatgaaagcccacgaaaacatcttcgaaatcgaggcgctgtacccgctggaattgttcgagcgttttatgcagtcccaaaccgattgctccatcgattgtgcctgtaaaattgatggtgacgaattgtatcccgcccgttttagtctggccctgtataacaaccagtatgccgaaaagcaaattcgcgaaaccatcgacttcttccatcaggtagagggtcggaccgaggtgaaactgaactatcagcaactgcagcacttcctgggtgctgacttcgattttagcaaagtgattcgaaacctggtgggtgtggatgcacgccgcgaactggctgattcccgggttaaactgtatatttggatgaacgattacccagagaaaatggcgaccgccatggcatggtgcgatgataagaaggaattgtcgacgttgatagtaaatcaggagtttctggtcgggttcgatttttatttcgatggtcgcacggcaatagaattatacattagtctgtcatccgaagaatttcagcagacacaagtttgggaacgcctcgcaaaggtagtgtgcgccccagcgctgcgccttgttaatgattgccaggcgatccagattggcgtgagccgtgccaatgatagtaagatcatgtattaccatacccttaatccgaactcgtttatcgacaatctgggcaatgaaatggcaagcagagttcacgcgtattaccgacatcaaccggttcgctctctggtagtatgcataccagaacaggagttgaccgcccggtccatacagcgcttaaacatgtattactgtatgaactaataa

SEQ ID NO: 707 - DNA, 958 bp, Artificial Sequence
  Synthetic
agaaatattacaacgaggtaaaggcatgaaaaccattctgattattaccaataccctggatctgaccgtggattatattattaatcgctataatcataccgctaaattttttcgtctgaataccgatcgtttttttgattatgatattaatattaccaatagcggtaccagcattcgtaatcgtaaatctaatctgattattaatattcaggaaattcatagcctgtattatcgcaaaattaccctgccgaatctggatggctatgaaagtaaatattggaccctgatgcagcgcgaaatgatgagtattgttgaaggcattgcagaaaccgctggcaattttgcactgacccgtccgtctgtgctgcgcaaagctgataataaaattgtgcagatgaaactggcagaagaaattggttttattctgccgcagagtctgattaccaattcaaatcaggcggcagcctcattttgcaataaaaataataccagcattgtgaaaccgctgagtaccggccgcattctgggtaaaaataaaattggcattattcagaccaatctggttgaaacccatgaaaatattcagggcctggaactgtctccggcttattttcaggattatattccgaaagataccgaaattcgtctgaccattgttggtaataaactgtttggcgccaatattaaatcaaccaatcaggttgattggcgcaaaaatgatgcactgctggaatataaaccggccaatattccggataaaattgccaaaatgtgtctggaaatgatggaaaaactggaaattaattttgcggcgtttgattttattattcgtaatggtgattatatttttctggaactgaatgccaatggtcagtggctgtggctggaagatattctgaaatttgatatttcaaataccattattaattatctgctgggtgaaccgatttaataataa

SEQ ID NO: 708 - DNA, 1427 bp, Artificial Sequence
  Synthetic
agaactaaggaggttagaggatggcaaacctgatccaggaccgcgaggacgaactgattcatttccatccgtacaaactgttcgaggtggattcaaaaaccttcttctataacgtagtcaccaacgcgatttttgaaattgatagcctgataatcgacattcttcactcaaaaggtaaaaatgaggagcacgttgtgaaagatttggctgaacgctatgagctgtctcaggttcgcgaagcgatccagaacatgaaagaggcatacattatagcaaccgatgctaacatctccgacgtagagaagatgggtatcttagataactcgcagcgcgtttttaaactgtctagcctgacgctctttatggtgcaggaatgcaacctgcggtgtacgtattgttacggcgaagaaggagaatacaaccagaaaggtaaaatgacgtccgaaatcgcccggagcgcagtggattttctgattcaacagagtggtgaaatcgaacagttgaacatcacattctttggaggcgaaccgctgctcaactttccattaatacaagaaaccgtgcagtatgtgcacgaacagagcgagatccataacaagaaatttagcttttccatcaccaccaatggcacgctcattacccccaaaatcaaaaacttcttctataaacaccactttgcagtccagacttctatcgatggtgatgaaaagacgcacaatttcaatcgcttcttcaaaggaggccagggctcttatgatctgctgttaaagcggacggaagaaatgcgcaatgaccgtaaaattggtgcacgtggaaccgtgacccctgccgagctggacctctcaaaatcatttgaccacttagttaaactcggctttcgcaaaatctacttatcacccgctttatatagtctctctgacgatcactacgacaccctgagcaaagagatggtcaaacttgttgaacaattccgtgagctgctggagcgtgaagattacgtcaccgcgaagaaaatgtctaatgttctgggtatgttatcgaagattcactccggtggcccgcgcattcatttttgcggtgccggcactaatgctgccgctgtcgatgtccgcggcaaccttttcccgtgtcatcgtttcgtgggtgaagatgaatgttcaatcggtaacctgttcgacgaggacccgctgtcaaaacagtacaactttatagagaattctacagtacgcaaccgtactacgtgttcgaaatgctgggcgaagaatctgtgcggcggtggttgtcaccaagaaaatttcgccgagaatggtaatgtgaaccagccagtgggcaaattatgcaaagtgaccaaaaacttcatcaacgcgaccatcaatctgtacttgcaacttactcaagaacaacgcagcattctgttcggctaataa

SEQ ID NO: 709 - DNA, 1471 bp, Artificial Sequence
  Synthetic
agacacagggaggtctttatatgacataccgtcgcacctcctatgcggtatgggagatcacgctgaaatgcaatctggcatgttcgcactgtggaagtcgtgccgggcacacgcgagcaaaagaactgtccacacaggaagcgctggatctggtccgtcagatggctgatgtcggcattatcgaagttactctgattgggggtgaagcgttcctgcgtccagactggctgcagattgccgaggcgataacgaaagccgggatgctgtgcagcatgactacgggcggttatggcatatcgctggaaaccgcccgcaaaatgaaagcggcaggaatcgcgagcgtgagcgttagcatcgatggcttggaggaaacccatgatcgcttacgcggtcgcaaaggctcttggcaggctgcgtttaaaacaatgagccatttgagagaagtgggcatcttctttggctgtaacacccagattaaccgtctgtcggcccctgaatttccgctgatatatgaacgcatccgtgacgccggggcacgtgcctggcagatccagcttacggtgccgatgggccgcgctgccgataacgcaaatatccttctgcaaccgtacgaactgcttgatctgtatccgatgattgctcgagtggcccgccgggcccgtcaagagggcgtgcaaatccagccaggtaataatattgggtattacggcccttacgaacgtcttttacgtggccgggggagcgatagtgagtgggcattttggcagggctgtgccgcgggcttaagtaccctgggtattgaagcggatggtgctataaaaggttgtccctcactgccaacgagcgcgtataccggcggtaacattcgcgaacatagtctgcgagaaatagtggaagaatcggaacagctgcgttttaacctcggtgcagggacgagccaagggaccgcccacttgtggggcttttgccagacgtgtgaatttagtgaattgtgcagaggtggttgtacgtggacagctcacgtgttctttaaccgccgtgggaataacccgtattgtcatcatcgggcgcttttccaagcggagcagggtatcagagaacgtgtcgtgccaaaggtcgaagctcagggcctgccgtttgacaacggtgaatttgaacttatcgaagaacctattgacgcgcctctgcccgaaaatgatccactgcactttaccagcgacttagtgcagtggtcagcgagttggcaggaagaatcggaatctataggcgcagtggtagactaataacacaagggggtagtagtatggtggaaaacattgataatgaacgtgagaaaagtgcgaacgaaattgaaccggaaagcctgcttctgccgcgccaggcttggcagtcgcagatcgcctatcttaaagcgattctgaaagccaaacaggcgcttgaccggatcgaaaaacgttatctgcggtaataa

SEQ ID NO: 710 - DNA, 2353 bp, Artificial Sequence
  Synthetic
ctaaattcccccgaggtcaataatgcaatctacaccattactgcaaatacaaccacatttccatgtagaggtcattgaaccaaagcaagtctacttgttgggtgaacaagctaatcatgcattgacaggccaattatactgccaaattttgccattgttaaacggacaatacacattggaacaaatcgttgaaaaactagacggagaagtaccacctgaatacattgattatgtgctggagagactagctgagaagggctatctgactgaagcagcacctgaattatctagtgaagtggccgctttctggtctgagctggggattgcacctcctgtcgcggccgaagcattacgtcaacctgtgactttaacacctgttggaaacatcagcgaagtaacagtagcagccttaaccacagccctacgtgatatcggtatttccgttcaaacacctacagaagctggatcgccaactgcattgaacgttgtacttaccgatgattatctccaaccagaactcgctaagatcaataagcaagccttagaaagtcaacaaacttggctacttgtcaaaccagttggctccgtgttatggttgggtccggtattcgtgccaggaaaaacaggttgctgggattgtttggctcacagattaagggggaatagagaggtagaggcctctgtattgagacaaaaacaagctcaacaacaacgtaatggacaaagcgggtctgtaataggatgccttcccacggctagagcgacactgccctcaacactccaaactgggctgcagttcgctgctaccgaaattgctaaatggatagttaagtatcatgttaatgccacagcgcctggcaccgtattcttccctacattggatggtaagataattacgctaaatcactccatactggatttgaagtcacatattctgatcaagcgttctcaatgtcccacctgtggtgacccaaaaatcttacagcaccgtggtttcgaacctttaaaacttgagtcaaggcctaaacagttcacctcagacggcggacatcgtggtactacccctgaacaaactgtccagaaatatcaacatttaatctcgcctgttaccggtgtagttactgaattggtcaggataactgatccggccaatccactagttcacacatatagagctggtcatagcttcgggagcgctacatcgctgagagggctgcgtaataccttaaagcataagagttcaggtaagggtaagactgattctcaaagtaaagcctcgggcctgtgtgaggcggtagaacgttactcaggaatctttcaaggtgacgaaccgagaaaacgcgccacattggctgaattgggagatttggcaattcaccctgagcaatgcttgtgtttttccgacggtcagtacgctaatagagaaactttaaacgaacaggcaacggtggcacatgattggatacctcaacgttttgatgcatcacaagctattgaatggactccagtctggtccctaactgaacagacccataaatatttgcccaccgcattgtgttactaccattatcctctacccccagaacacagattcgcacgtggagattcgaatggtaatgctgccggaaatacgttggaagaggctatactccaaggcttcatggaattagtcgagagagatggtgtggctttatggtggtataacaggctacgcagacccgctgtagacttaggctcatttaacgagccatacttcgttcagttgcaacaattctacagagaaaacgatagagatttgtgggttttggacttgacagctgatttaggtatcccggctttcgcgggcgtttctaatagaaaaactggtagttcggagaggttgatattaggattcggtgcacacctcgatcctactattgcaattctgagagcagttacagaagttaaccagattggccttgaattagataaagttccagacgagaaccttaagagcgacgcaacagattggctaattactgaaaaattagctgaccacccttatttgttaccagatacaactcaacctctaaaaactgctcaagattatcctaaaaggtggtctgacgatatatacacggacgtaatgacttgcgttaatattgctcaacaagcaggacttgaaactctagttattgatcaaacacgtccggacattggtttgaatgttgttaaggtgacagtcccggggatgaggcacttttggtcaagatttggagaggggaggctttatgacgtgcccgtcaaattaggttggcttgacgaacctttgaccgaagcgcaaatgaaccccacgccgatgcctttttaataa

SEQ ID NO: 711 - DNA, 1071 bp, Artificial Sequence
  Synthetic
ttcaatcgttaaggaggtacataaatgcacgatcgtagcgcgaatgttagctggaccaaatacatcgcgtttggtctgcgcattgccagcgaactcaacttaccggaactgatattggcggctcccgaagccgttgaggatgttgtcatacgccaggcagatctcacggcctggtctggccaacttgaacaggcaaattttgtcatgttggacgaacgtttcatgtttcagatcccggggaccgccatttatgcggtacgcgaaggcaaagagattgaagtgagcatcttctctggggccgacccggacaccgtgcgccttttcgtgctggggacgtgcatgggcgtgctcttgatgcagcgccgcattctgcctatccacggctccgccgtcgttatcggtggccgcgcgtatgcctttgttggtgaatcaggcacaggtaaatcgaccttagctgcagcatttcggcaggccggttaccaaatggttagcgatgatgtcattgccgtcaaagcgaccgcatctagcgctattgtttaccctgcgtatccacagcaaaaactgggtttagattcgctgttgcagcttgaagcgctccgtgagaataagcacgcccgcaagcgtaacaacatccgttctctgacggatggcaatagtgtgatgccgcagtacagcgatctgcgcatgctggcgggggaactgaataaatatgcagttccagccgtcgatgaattctttaatgacccgctgccgttgggcggtgttttcgaactggtagcagacagtccgattcgagcattaatgcgcgaaggcgaactcgtcgctgtgaccgagcaaccgctgaacgttctggaatgtttacatactcttctgcaacacacgtaccgtcgggtaatcatccctcgaatgggactgagcgagtggagcttcgatactgcggcccgaatggcacgcaaggtcgagggctggcgactcctccgtgatagctccgtgttcacggctagtgaagtcgtccagcgcgtcctcgacatcatccgtaaggaggaaaagagctacggatcacactaataa

SEQ ID NO: 712 - DNA, 573 bp, Artificial Sequence
  Synthetic
actgaactataaggtaggtatattatgcacggtaaactgctgatctgcgcaactgcttcgatcaacgtcatcaatatcaaccattatattgtggagctgaaacagcacttcgatgaggtgaatatcctgttttcaccttcctcgaagaactttatcaacaccgatgtcctgaagctgttttgcgataatctgtatgacgagatcaaagatccgctgctgaaccacatcaacatagtggagaaccacgagtatatcttggtgctgcctgccagtgccaatacgatcaacaaaatcgcgaacggtatatgcgataacctcttgacgaccgtatgcttaaccgggtaccagaaactgtttatctttccgaatatgaacatccgcatgtggggaaatccgttcttacagaaaaatattgacctgcttaaaagcaacgacgtgaaggtgtattcccccgacatgaacaaatcttttgagataagctcaggccgctacaaaaataacatcacgatgccgaatatcgaaaacgtgctgaattttgtcctgaacaatgagaaacgcccgctggattaataa

SEQ ID NO: 713 - DNA, 1874 bp, Artificial Sequence
  Synthetic
gccccgtcagacaccttctaaggaggacatatatggaagggttgtatcagctgaaagtgcatagtcgtatacacaaactgcaaaataatatcgcaataggtagcatgccgcctcacgcgctgatcatcgaggatgcccccgaatatttgtcaaacgttctgcgcttctttagtagcaaaaagactataaaagaagctgaagtgtacctgtcggataatacgaatctgagctccaatgagatcaacctgttgttaggtgatctgattgagaacgagattatcgtaaagcaaaactacgactcgaataatcggtacagtcgacacagtctgtattacgagatgattgatgccaacgctgaaaacgcgcagaaaattctggcagagaaaacagtgggcctcgttgggatgggcgggattggttccaatgtagccatgaatctcgcagccgccggtgttggcaaactgatctttagtgatggcgataccatagaactgtctaatttaacgcgacagtatctttacaaagaggatcaggtgggcttgagcaaagtagagagcgccaaagaacaactgcaattactgaatagcgaagtcgagcttatcccggtttgcgaaagtatctctggtgaggaactgttcgacaaccatttctccgaatgcgatttcgtcgtactgtccgccgactctccgttctttgttcacgaatggattaacaatgccgcgttgaaatatggcttctcctactctaacgcaggatatatcgaaacctatggcgcgatcggtccactggtgatacctggggaaactgcctgctacgaatgctataaagacaagggcgatctttacttgtactccgacaacaaggaagaattttctgtgaacctgaatgaatcattccaagcaccgagctatggaccgcttaatgcgatggttagttccattcaggcgaatgaagtgatacgccacctcctcggacttaaaaccaaaacgtccggcaaacggctgctgatcaacagtgaaatctacaaaatccacgaagagaacttcgagaagaagaacaactgcctgtgctcggatattaagggcgagaagctgtcgaagaacacccttaactccgataaagagctgcacgaagtgtatatcgaagaacgcgaatcggattctttcaactccattctcttggataaaaccatgagcaagctggtaaaaattaacaaagaggagacaaaaatcctcgacattggttgcgctaccggcgaacaggctctgtatttcgcgaataaaggtgctaaggtgaccgctgtcgacatttcagacgatatgttgaaggtgctggacaagaaagcaagcaacattaacgcggggagtatcaaaaccatgcgtggtaatatcgaatccatcgaggtgaatgacacttttaattacatcgtctgtaacaacatccttgattacctgccggagatcgaccgcacgctgagaaaacttaacatgtttttgaaaaatgacgggacgctgattgtgacgattccccaccccgtgaaggatggtggagggtggcggaaagattattataacggcaaatggaactacgaagagtttatcctgaaggattacttcaacgagggtctgatcgaaaagagccgcgaggacaaaaatggggaaacggtgatcaaaagcattaaaacgtaccacagaaccaccgaaacctatttcaatagctttactgacgctggcttcaaggtagtatctctgctggaaccgcaaccgctttcaactgtttcagagactcatccaattctgttcgaaaagtgttcgcgcattccgtactttcaagtttttgtgctcaagaaagaggatcgccacgccatttaataa

SEQ ID NO: 714 - protein, 5 aa, Artificial Sequence
  Synthetic
RLVPR

SEQ ID NO: 715 - protein, 20 aa, Artificial Sequence
  Synthetic
KAPIRAYACTNPDPCTDEEI

SEQ ID NO: 716 - protein, 20 aa, Artificial Sequence
  Synthetic
KAPIRAYPCEVLDNCTNPDH

SEQ ID NO: 717 - protein, 20 aa, Artificial Sequence
  Synthetic
KEPIRAYACTNPDPCTDEEI

SEQ ID NO: 718 - protein, 20 aa, Artificial Sequence
  Synthetic
KEPIRAYKCDEGDHCGTKDL

SEQ ID NO: 719 - protein, 20 aa, Artificial Sequence
  Synthetic
KEPIRAYPCEVLDNCTKPDH

SEQ ID NO: 720 - protein, 20 aa, Artificial Sequence
  Synthetic
KEPIRAYPCEVLDNCTNPDH

SEQ ID NO: 721 - protein, 20 aa, Artificial Sequence
  Synthetic
KEPIRAYQCPWHERCDQCEP

SEQ ID NO: 722 - protein, 20 aa, Artificial Sequence
  Synthetic
KEPIRAYVCKYGEWCEIVEI

SEQ ID NO: 723 - protein, 20 aa, Artificial Sequence
  Synthetic
KEPIRAYYCNITERCHSDEH

SEQ ID NO: 724 - protein, 20 aa, Artificial Sequence
  Synthetic
IRAYACTACEQCSKCDTNEK

SEQ ID NO: 725 - protein, 20 aa, Artificial Sequence
  Synthetic
IRAYECPADETCMHCESHEM

SEQ ID NO: 726 - protein, 20 aa, Artificial Sequence
  Synthetic
IRAYHCIFIESCDVCELNEP

SEQ ID NO: 727 - protein, 20 aa, Artificial Sequence
  Synthetic
IRAYKCEKREECADCDHLEF

SEQ ID NO: 728 - protein, 20 aa, Artificial Sequence
  Synthetic
IRAYKCTSKECCIQCEGSES

SEQ ID NO: 729 - protein, 20 aa, Artificial Sequence
  Synthetic
IRAYMCVFCEICVMCDTHEM

SEQ ID NO: 730 - protein, 20 aa, Artificial Sequence
  Synthetic
IRAYPCGKREPCNTCEHFET

SEQ ID NO: 731 - protein, 20 aa, Artificial Sequence
  Synthetic
IRAYPCTTTEACTACDSSDA

SEQ ID NO: 732 - protein, 20 aa, Artificial Sequence
  Synthetic
IRAYRCRCPENCLSCEPPER

SEQ ID NO: 733 - protein, 20 aa, Artificial Sequence
  Synthetic
IRAYSCTPDEVCPLCEPCEP

SEQ ID NO: 734 - protein, 20 aa, Artificial Sequence
  Synthetic
IRAYTCTMAEKCQICDVSEG

SEQ ID NO: 735 - protein, 42 aa, Artificial Sequence
  Synthetic
YRPYIAKYVEEQTLQNSTNLVYDDITQISFINKEKNVKKINL

SEQ ID NO: 736 - protein, 42 aa, Artificial Sequence; identical to SEQ ID NO: 735
  Synthetic

SEQ ID NO: 737 - protein, 74 aa, Artificial Sequence
  Synthetic
SIESAKAFYQRMTDDASFRTPFEAELSKEERQQLIKDSGYDFTAEEWQQAMTEIQAARSNEELNEEELEAIAGG

SEQ ID NO: 738 - protein, 13 aa, Artificial Sequence
  Synthetic
IKFSTLQRISAIT

SEQ ID NO: 739 - protein, 39 aa, Artificial Sequence
  Synthetic
NKKNILPQLGQPVIRLTAGQLSSQLAELSEEALGGVDAS

SEQ ID NO: 740 - protein, 20 aa, Artificial Sequence
  Synthetic
GPDTTIVTETIENADPDEYF

SEQ ID NO: 741 - protein, 20 aa, Artificial Sequence
  Synthetic
GPDTTIVTETIENADPDEYF

SEQ ID NO: 742 - protein, 12 aa, Artificial Sequence
  Synthetic
AVAAMYGVVFPM

SEQ ID NO: 743 - protein, 19 aa, Artificial Sequence
  Synthetic
SAITEENAMYTKGQVIVLS

SEQ ID NO: 744 - protein, 10 aa, Artificial Sequence
  Synthetic
TVPTLCSYDD

SEQ ID NO: 745 - protein, 9 aa, Artificial Sequence
  Synthetic
VGFGCGGYS

SEQ ID NO: 746 - protein, 8 aa, Artificial Sequence
  Synthetic
EDEIVHYS

SEQ ID NO: 747 - protein, 8 aa, Artificial Sequence
  Synthetic
GSFNSYCC

SEQ ID NO: 748 - protein, 8 aa, Artificial Sequence
  Synthetic
DEDVHYDS

SEQ ID NO: 749 - protein, 8 aa, Artificial Sequence
  Synthetic
QLVGRRNI

SEQ ID NO: 750 - protein, 9 aa, Artificial Sequence
  Synthetic
LAELSEEAL

SEQ ID NO: 751 - protein, 11 aa, Artificial Sequence
  Synthetic
LNEEELEAIAG

SEQ ID NO: 752 - protein, 12 aa, Artificial Sequence
  Synthetic
AIAAIYGAIIPG

SEQ ID NO: 753 - protein, 14 aa, Artificial Sequence
  Synthetic
ACAALYGAIILPAS

SEQ ID NO: 754 - protein, 48 aa, Artificial Sequence
  Synthetic
LKQINVIAGVKEPIRAYGCSANDACYFCDTRDNCKACDASDFCIKSDT

SEQ ID NO: 755 - protein, 30 aa, Artificial Sequence
  Synthetic
  misc_feature (18)..(18): Xaa can be any naturally occurring amino acid
  misc_feature (20)..(22): Xaa can be any naturally occurring amino acid
  MOD_RES (23)..(23): Xaa may be D or E
  misc_feature (24)..(24): Xaa can be any naturally occurring amino acid
  misc_feature (26)..(28): Xaa can be any naturally occurring amino acid
  MOD_RES (29)..(29): Xaa may be D or E
  misc_feature (30)..(30): Xaa can be any naturally occurring amino acid
LKQINVIAGVKEPIRAYXCXXXXXCXXXXX

SEQ ID NO: 756 - protein, 14 aa, Artificial Sequence
  Synthetic
GVCKYGEWCEIVEI

SEQ ID NO: 757 - protein, 17 aa, Artificial Sequence
  Synthetic
IRAYVCKYGEWCEIVEI

SEQ ID NO: 758 - protein, 23 aa, Artificial Sequence
  Synthetic
MSTKDFNLDLVSVSKKDSGASPR

SEQ ID NO: 759 - protein, 34 aa, Artificial Sequence
  Synthetic
ITSISLCTPGCKTGALMGCNMKTATCHCSIHVSK

SEQ ID NO: 760 - protein, 34 aa, Artificial Sequence
  Synthetic
IBAIALCBPGCKBGALMGCNMKBABCHCSIHVAK

SEQ ID NO: 761 - protein, 34 aa, Artificial Sequence; identical to SEQ ID NO: 759
  Synthetic

SEQ ID NO: 762 - protein, 34 aa, Artificial Sequence; identical to SEQ ID NO: 760
  Synthetic

SEQ ID NO: 763 - protein, 22 aa, Artificial Sequence
  Synthetic
GGAGHVPEYFVGIGTTPISFYG

SEQ ID NO: 764 - protein, 22 aa, Artificial Sequence
  Synthetic
GGAGHVPEYFVGIGTTPISFYG

SEQ ID NO: 765 - protein, 33 aa, Artificial Sequence
  Synthetic
GVGYBBYWGILPLVBKNPQICPVAENBVKCRLL

SEQ ID NO: 766 - protein, 33 aa, Artificial Sequence
  Synthetic
GVGYBBYWGILPLVBKNPQICPVSENBVKCRLL

SEQ ID NO: 767 - protein, 33 aa, Artificial Sequence
  Synthetic
GGWFTAIQLBLAGRCGNWFBGSFECTANNVKCG

SEQ ID NO: 768 - protein, 25 aa, Artificial Sequence
  Synthetic
GGDGVMHBLBHECHMNBWQFLLBCC

SEQ ID NO: 769 - protein, 28 aa, Artificial Sequence
  Synthetic
GSRWWQGVLPBVAHECRMNAFQHIFBCC

SEQ ID NO: 770 - protein, 28 aa, Artificial Sequence
  Synthetic
GGKNGGVFKBIAHECHLNBWAFLABCCS

SEQ ID NO: 771 - protein, 34 aa, Artificial Sequence; identical to SEQ ID NO: 94
  Synthetic
  misc_feature (5)..(5): Xaa can be any naturally occurring amino acid
  misc_feature (9)..(9): Xaa can be any naturally occurring amino acid
  misc_feature (18)..(19): Xaa can be any naturally occurring amino acid
  misc_feature (22)..(22): Xaa can be any naturally occurring amino acid
  misc_feature (32)..(32): Xaa can be any naturally occurring amino acid

SEQ ID NO: 772 - protein, 33 aa, Artificial Sequence; identical to SEQ ID NO: 89
  Synthetic

SEQ ID NO: 773 - protein, 33 aa, Artificial Sequence; identical to SEQ ID NO: 117
  Synthetic

SEQ ID NO: 774 - protein, 32 aa, Artificial Sequence; identical to SEQ ID NO: 96
  Synthetic

SEQ ID NO: 775 - protein, 33 aa, Artificial Sequence
  Synthetic
GGGWYBAFKLBLAGRCGLCFBCSYECTANNVHC

SEQ ID NO: 776 - protein, 33 aa, Artificial Sequence
  Synthetic
GGWFBAIQLBLAGRCGNWFBGSFECTANNVKCG

SEQ ID NO: 777 - protein, 32 aa, Artificial Sequence
  Synthetic
GWQBAFRLBNQGRCGGVFBLSYECABPHVSCG

SEQ ID NO: 778 - protein, 42 aa, Artificial Sequence; identical to SEQ ID NO: 102
  Synthetic
  misc_feature (3)..(3): Xaa can be any naturally occurring amino acid
  misc_feature (10)..(10): Xaa can be any naturally occurring amino acid
  misc_feature (19)..(20): Xaa can be any naturally occurring amino acid
  misc_feature (24)..(24): Xaa can be any naturally occurring amino acid
  misc_feature (27)..(35): Xaa can be any naturally occurring amino acid

SEQ ID NO: 779 - protein, 29 aa, Artificial Sequence
  Synthetic
GLIYGKYRDVLSGARLVTPPEVALRLVPR

SEQ ID NO: 780 - protein, 42 aa, Artificial Sequence; identical to SEQ ID NO: 104
  Synthetic

SEQ ID NO: 781 - protein, 35 aa, Artificial Sequence; identical to SEQ ID NO: 105
  Synthetic

SEQ ID NO: 782 - protein, 24 aa, Artificial Sequence
  Synthetic
GWYWGNRRDIYGALRYANKRLVPR

SEQ ID NO: 783 - protein, 29 aa, Artificial Sequence
  Synthetic
GLIYGKYRDVLSGARLVTPPEVALRLVPR

SEQ ID NO: 784 - protein, 35 aa, Artificial Sequence; identical to SEQ ID NO: 105
  Synthetic

SEQ ID NO: 785 - protein, 24 aa, Artificial Sequence
  Synthetic
GWYWGNRRDIYGALRYANKRLVPR

SEQ ID NO: 786 - protein, 9 aa, Artificial Sequence
  Synthetic
LAELSEEAL

SEQ ID NO: 787 - protein, 3 aa, Artificial Sequence
  Synthetic
LCS

SEQ ID NO: 788 - protein, 11 aa, Artificial Sequence
  Synthetic
LNEEELEAIAG

SEQ ID NO: 789 - protein, 11 aa, Artificial Sequence
  Synthetic
AVAMYGVVFPW

SEQ ID NO: 790 - protein, 6 aa, Artificial Sequence
  Synthetic
GFGCGG

SEQ ID NO: 791 - protein, 4 aa, Artificial Sequence
  Synthetic
HYDS

SEQ ID NO: 792 - protein, 23 aa, Artificial Sequence
  Synthetic
SQRISAITEENAMYTKGQVIVLS

SEQ ID NO: 793 - skipped

SEQ ID NO: 794 - protein, 7 aa, Artificial Sequence
  Synthetic
PYIAKYV

SEQ ID NO: 795 - protein, 20 aa, Artificial Sequence
  Synthetic
GPDTTIVTETIENADPDEYF

SEQ ID NO: 796 - protein, 8 aa, Artificial Sequence
  Synthetic
QLVGRRNI

SEQ ID NO: 797 - protein, 3 aa, Artificial Sequence
  Synthetic
YCC

SEQ ID NO: 798 - protein, 12 aa, Artificial Sequence
  Synthetic
ACAALYGAEIPW

SEQ ID NO: 799 - protein, 13 aa, Artificial Sequence
  Synthetic
ACAALYGAEIPWS

SEQ ID NO: 800 - protein, 13 aa, Artificial Sequence
  Synthetic
ACAALYGAEIPWS

SEQ ID NO: 801 - protein, 13 aa, Artificial Sequence
  Synthetic
ACAAFYGTIIPWS

SEQ ID NO: 802 - protein, 13 aa, Artificial Sequence
  Synthetic
ACAAFYGTIMPWS

SEQ ID NO: 803 - protein, 13 aa, Artificial Sequence
  Synthetic
ACAAMYGIVLPWS

SEQ ID NO: 804 - protein, 13 aa, Artificial Sequence
  Synthetic
ACAAFYGAVLPWS

SEQ ID NO: 805 - protein, 13 aa, Artificial Sequence
  Synthetic
ACAAFYGVIVPWS

SEQ ID NO: 806 - protein, 13 aa, Artificial Sequence
  Synthetic
ACAAFYGVIVPWS

SEQ ID NO: 807 - protein, 13 aa, Artificial Sequence
  Synthetic
ACAAFYGSVVPWS

SEQ ID NO: 808 - protein, 13 aa, Artificial Sequence
  Synthetic
ACAAIYGAILPWS

SEQ ID NO: 809 - protein, 13 aa, Artificial Sequence
  Synthetic
ACAAIYGVVLPWS

SEQ ID NO: 810 - protein, 13 aa, Artificial Sequence
  Synthetic
ACAAIYGTVIPWS

SEQ ID NO: 811 - protein, 13 aa, Artificial Sequence
  Synthetic
ACAALYGSVFPWS

SEQ ID NO: 812 - protein, 9 aa, Artificial Sequence
  Synthetic
GGCGSLEMS

SEQ ID NO: 813 - protein, 15 aa, Artificial Sequence
  Synthetic
GVCGSQEQWVGRRQI

SEQ ID NO: 814 - protein, 10 aa, Artificial Sequence
  Synthetic
GICGSYDCDS

SEQ ID NO: 815 - protein, 12 aa, Artificial Sequence
  Synthetic
ACAALGSVFPWS

SEQ ID NO: 816 - protein, 15 aa, Artificial Sequence
  Synthetic
GVCGSQEQWVGRRQI

SEQ ID NO: 817 - protein, 10 aa, Artificial Sequence
  Synthetic
GICGSYDCDS

SEQ ID NO: 818 - protein, 18 aa, Artificial Sequence
  Synthetic
GATTALGTILPVCSSFDS

SEQ ID NO: 819 - protein, 9 aa, Artificial Sequence
  Synthetic
GGCGSLEMS

SEQ ID NO: 820 - protein, 29 aa, Artificial Sequence
  Synthetic
GCAWYNISCRLGNKGAYCTLTVECMPSCN

SEQ ID NO: 821 - protein, 25 aa, Artificial Sequence
  Synthetic
GTTWPCATVGVSVALCPTTKCTSQC

SEQ ID NO: 822 - protein, 13 aa, Artificial Sequence
  Synthetic
ACAAMYGVVFPWS

SEQ ID NO: 823 - protein, 34 aa, Artificial Sequence
  Synthetic
  MOD_RES (26)..(26): May be M, I, L, F
  MOD_RES (29)..(29): May be V, T, I, A, S, L
  MOD_RES (30)..(30): May be V, I
  MOD_RES (31)..(31): May be F, L, V, I, M
MLEELNEEELEAIAGENLYFQACAAMYGVVFPWS

SEQ ID NO: 824 - protein, 13 aa, Artificial Sequence
  Synthetic
ACAAFYGTIIPWS

SEQ ID NO: 825 - protein, 13 aa, Artificial Sequence
  Synthetic
ACAAFYGTIMPWS

SEQ ID NO: 826 - protein, 13 aa, Artificial Sequence
  Synthetic
ACAAMYGIVLPWS

SEQ ID NO: 827 - protein, 13 aa, Artificial Sequence
  Synthetic
ACAAFYGAVLPWS

SEQ ID NO: 828 - protein, 13 aa, Artificial Sequence
  Synthetic
ACAAFYGVIVPWS

SEQ ID NO: 829 - protein, 13 aa, Artificial Sequence
  Synthetic
ACAAIYGAILPWS

SEQ ID NO: 830 - protein, 13 aa, Artificial Sequence
  Synthetic
ACAALYGSVFPWS

SEQ ID NO: 831 - protein, 13 aa, Artificial Sequence
  Synthetic
ACAAFYGVIVPWS

SEQ ID NO: 832 - protein, 13 aa, Artificial Sequence
  Synthetic
ACAAIYGVVLPWS

SEQ ID NO: 833 - protein, 13 aa, Artificial Sequence
  Synthetic
ACAAFYGSVVPWS

SEQ ID NO: 834 - protein, 13 aa, Artificial Sequence
  Synthetic
ACAAIYGTVIPWS

SEQ ID NO: 835 - protein, 63 aa, Artificial Sequence
  Synthetic
YRPYIAKYVEEQTLQNSTNLVYDDITQISFINKEKNVKKINLGPDTTIVTETIENADPDEYFL

SEQ ID NO: 836 - protein, 65 aa, Artificial Sequence
  Synthetic
NKKNILPQLGQPVIRLTAGQLSSQLAELSEEALGGVDASTLPVPTLCSYDGVDASTVPTLCSYDD

SEQ ID NO: 837 - protein, 60 aa, Artificial Sequence
  Synthetic
KDLLKELMYEVDLEEMENLQGSGYSAAQCAWMALSCVNYIPGVGFGCGGYSACELYKRYC

SEQ ID NO: 838 - protein, 41 aa, Artificial Sequence
  Synthetic
RKKEWQTPELEVLDVRLTAAGPGKAKPDAVQPDEDEIVHYS

SEQ ID NO: 839 - protein, 41 aa, Artificial Sequence
  Synthetic
KKQYSKPSLEVLDVHQTMAGPGTSTPDAFQPDPDEDVHYDS

SEQ ID NO: 840 - protein, 42 aa, Artificial Sequence; identical to SEQ ID NO: 735
  Synthetic

SEQ ID NO: 841 - protein, 42 aa, Artificial Sequence; identical to SEQ ID NO: 735
  Synthetic

SEQ ID NO: 842 - protein, 40 aa, Artificial Sequence
  Synthetic
YRPYIAKYVEEQTLQNSTNLVYDDITQISFINKEKNVKKI

SEQ ID NO: 843 - protein, 36 aa, Artificial Sequence
  Synthetic
YRPYIAKYVEEQTLQNSTNLVYDDITQISFINKEKN

SEQ ID NO: 844 - protein, 33 aa, Artificial Sequence
  Synthetic
YRPYIAKYVEEQQTLQNSTNLVYDDITQISFIN

SEQ ID NO: 845 - protein, 29 aa, Artificial Sequence
  Synthetic
YRPYIAKYVEEQQTLQNSTNLVYDDITQI

SEQ ID NO: 846 - protein, 24 aa, Artificial Sequence
  Synthetic
YRPYIAKYVEEQTLQNSTNLVYDD

SEQ ID NO: 847 - protein, 41 aa, Artificial Sequence
  Synthetic
YRPYIAKYVEEQQQNSTNLVYDDITQISFINKEKNVKKINL

SEQ ID NO: 848 - protein, 36 aa, Artificial Sequence
  Synthetic
YRPYIAKYVEEQNLVYDDITQISFINKEKNVKKINL

SEQ ID NO: 849 - protein, 32 aa, Artificial Sequence
  Synthetic
YRPYIAKYVEEQDDITQISFINKEKNVLLINL

SEQ ID NO: 850 - protein, 28 aa, Artificial Sequence
  Synthetic
YRPYIAKYVEEQQISFINKEKNVKKINL

SEQ ID NO: 851 - protein, 24 aa, Artificial Sequence
  Synthetic
YRPYIAKYVEEQINKEKNVKKINL

SEQ ID NO: 852 - protein, 48 aa, Artificial Sequence
  Synthetic
YRPYIAKYVEEQTLQNSTNLVYDDITQISFINKEKNVKKINLENLYFQ

SEQ ID NO: 853 - protein, 51 aa, Artificial Sequence
  Synthetic
YRPYIAKYVEEQTLQNSTNLVYDDITQISFINKEKNVKKINLENLYFQGGG

SEQ ID NO: 854 - protein, 54 aa, Artificial Sequence
  Synthetic
YRPYIAKYVEEQTLQNSTNLVYDDITQISFINKEKNVKKINLGGGENLYFQGGG

SEQ ID NO: 855 - protein, 21 aa, Artificial Sequence
  Synthetic
GPDTTIVTETIENADPDEYFL

SEQ ID NO: 856 - protein, 42 aa, Artificial Sequence; identical to SEQ ID NO: 735
  Synthetic

SEQ ID NO: 857 - protein, 21 aa, Artificial Sequence
  Synthetic
GPDTTIVTETIENADPDEYFL

SEQ ID NO: 858 - protein, 21 aa, Artificial Sequence
  Synthetic
GPDTTIVTETIENADPDEYFL

SEQ ID NO: 859 - protein, 20 aa, Artificial Sequence
  Synthetic
GPDTTIVTETIENADPDEYF

SEQ ID NO: 860 - protein, 11 aa, Artificial Sequence
  Synthetic
YRPYIAKYVEE

SEQ ID NO: 861 - protein, 20 aa, Artificial Sequence
  Synthetic
GPDTTIVTETIENADPDEYF

SEQ ID NO: 862 - protein, 74 aa, Artificial Sequence; identical to SEQ ID NO: 737
  Synthetic

SEQ ID NO: 863 - protein, 74 aa, Artificial Sequence; identical to SEQ ID NO: 737
  Synthetic

SEQ ID NO: 864 - protein, 73 aa, Artificial Sequence
  Synthetic
SIESAKAFYQRMTDDASFRTPFEAELSKEERQQLIKDSGYDFTAEEWQQAMTEIQAARSNEELNEEELEAIAG

SEQ ID NO: 865 - protein, 73 aa, Artificial Sequence; identical to SEQ ID NO: 864
  Synthetic

SEQ ID NO: 866 - protein, 80 aa, Artificial Sequence
  Synthetic
SIESAKAFYQRMTDDASFRTPFEAELSKEERQQLIKDSGYDFTAEEWQQAMTEIQAARSNEELNEEELEAIAGGENLYFQ

SEQ ID NO: 867 - protein, 82 aa, Artificial Sequence
  Synthetic
SIESAKAFYQRMTDDASFRTPFEAELSKEERQQLIKDSGYDFTAEEWQQAMTEIQAARSNEELNEEELEAIAGGENLYFQGG

SEQ ID NO: 868 - protein, 84 aa, Artificial Sequence
  Synthetic
SIESAKAFYQRMTDDASFRTPFEAELSKEERQQLIKDSGYDFTAEEWQQAMTEIQAARSNEELNEEELEAIAGGGGENLYFQGG

SEQ ID NO: 869 - protein, 30 aa, Artificial Sequence
  Synthetic
AVAAMYGVVFPMYGVVFPWDNEFPWPRWGG

SEQ ID NO: 870 - protein, 30 aa, Artificial Sequence; identical to SEQ ID NO: 869
  Synthetic

SEQ ID NO: 871 - protein, 27 aa, Artificial Sequence
  Synthetic
AAMYGVVFPMYGVVFPDNEFPWPRWGG

SEQ ID NO: 872 - protein, 30 aa, Artificial Sequence; identical to SEQ ID NO: 869
  Synthetic

SEQ ID NO: 873 - protein, 30 aa, Artificial Sequence; identical to SEQ ID NO: 869
  Synthetic

SEQ ID NO: 874 - protein, 30 aa, Artificial Sequence; identical to SEQ ID NO: 869
  Synthetic

SEQ ID NO: 875 - protein, 74 aa, Artificial Sequence; identical to SEQ ID NO: 737
  Synthetic

SEQ ID NO: 876 - protein, 13 aa, Artificial Sequence
  Synthetic
ELNEEELEAIAGG

SEQ ID NO: 877 - protein, 74 aa, Artificial Sequence; identical to SEQ ID NO: 737
  Synthetic

SEQ ID NO: 878 - protein, 13 aa, Artificial Sequence
  Synthetic
ELNEEELEAIAGG

SEQ ID NO: 879 - protein, 30 aa, Artificial Sequence; identical to SEQ ID NO: 869
  Synthetic

SEQ ID NO: 880 - protein, 30 aa, Artificial Sequence; identical to SEQ ID NO: 869
  Synthetic

SEQ ID NO: 881 - protein, 19 aa, Artificial Sequence
  Synthetic
AVAAMYGVVFPMYGVVFPW

SEQ ID NO: 882 - protein, 19 aa, Artificial Sequence
  Synthetic
AVAAMYGVVFPMYGVVFPW

SEQ ID NO: 883 - protein, 12 aa, Artificial Sequence
  Synthetic
AVAAMYGVVFPW

SEQ ID NO: 884 - protein, 12 aa, Artificial Sequence
  Synthetic
AVAAMYGVVFPW

SEQ ID NO: 885 - protein, 13 aa, Artificial Sequence
  Synthetic
ELNEEELEAIAGG

SEQ ID NO: 886 - protein, 12 aa, Artificial Sequence
  Synthetic
AVAAMYGVVFPW

SEQ ID NO: 887 - protein, 13 aa, Artificial Sequence
  Synthetic
IKFSTLQRISAIT

SEQ ID NO: 888 - protein, 13 aa, Artificial Sequence
  Synthetic
IKFSTLQRISAIT

SEQ ID NO: 889 - protein, 10 aa, Artificial Sequence
  Synthetic
IKFSTLQRIS

SEQ ID NO: 890 - protein, 16 aa, Artificial Sequence
  Synthetic
IKFSTLQRISAITGGG

SEQ ID NO: 891 - protein, 15 aa, Artificial Sequence
  Synthetic
EENAMYTKGQVIVLS

SEQ ID NO: 892 - protein, 13 aa, Artificial Sequence
  Synthetic
IKFSTLQRISAIT

SEQ ID NO: 893 - protein, 13 aa, Artificial Sequence
  Synthetic
IKFSTLQRISAIT

SEQ ID NO: 894 - protein, 13 aa, Artificial Sequence
  Synthetic
IKFSTLQRISAIT

SEQ ID NO: 895 - protein, 13 aa, Artificial Sequence
  Synthetic
IKFSTLQRISAIT

SEQ ID NO: 896 - protein, 15 aa, Artificial Sequence
  Synthetic
EENAMYTKGQVIVLS

SEQ ID NO: 897 - protein, 12 aa, Artificial Sequence
  Synthetic
EENAMYTKGQVI

SEQ ID NO: 898 - protein, 9 aa, Artificial Sequence
  Synthetic
EENAMYTKG

SEQ ID NO: 899 - protein, 6 aa, Artificial Sequence
  Synthetic
EENAMY

SEQ ID NO: 900 - protein, 15 aa, Artificial Sequence
  Synthetic
EENAMYTKGQVIVLS

SEQ ID NO: 901 - protein, 27 aa, Artificial Sequence
  Synthetic
FSTLSQRISAITEENAMYTKGQVIVLS

SEQ ID NO: 902 - protein, 39 aa, Artificial Sequence; identical to SEQ ID NO: 739
  Synthetic

SEQ ID NO: 903 - protein, 39 aa, Artificial Sequence; identical to SEQ ID NO: 739
  Synthetic

SEQ ID NO: 904 - protein, 39 aa, Artificial Sequence; identical to SEQ ID NO: 739
  Synthetic

SEQ ID NO: 905 - protein, 34 aa, Artificial Sequence
  Synthetic
NKKNILPQLGQPVIRLTAGQLSSQLAELSEEALG

SEQ ID NO: 906 - protein, 10 aa, Artificial Sequence
  Synthetic
TVPTLCSYDD

SEQ ID NO: 907 - protein, 26 aa, Artificial Sequence
  Synthetic
TLPVPTLCSYDGVDASTVPTLCSYDD

SEQ ID NO: 908 - protein, 10 aa, Artificial Sequence
  Synthetic
TVPTLCSYDD

SEQ ID NO: 909 - protein, 10 aa, Artificial Sequence
  Synthetic
TVPTLCSYDD

SEQ ID NO: 910 - protein, 10 aa, Artificial Sequence
  Synthetic
TVPTLCSYDD

SEQ ID NO: 911 - protein, 9 aa, Artificial Sequence
  Synthetic
LAELSEEAL

SEQ ID NO: 912 - protein, 3 aa, Artificial Sequence
  Synthetic
LCS

SEQ ID NO: 913 - protein, 8 aa, Artificial Sequence
  Synthetic
GSFNSYCC

SEQ ID NO: 914 - protein, 8 aa, Artificial Sequence
  Synthetic
GSFNSYCC

SEQ ID NO: 915 - protein, 9 aa, Artificial Sequence
  Synthetic
VGFGCGGYS

SEQ ID NO: 916 - protein, 9 aa, Artificial Sequence
  Synthetic
VGFGCGGYS

SEQ ID NO: 917 - protein, 6 aa, Artificial Sequence
  Synthetic
GFGCGG

SEQ ID NO: 918 - protein, 8 aa, Artificial Sequence
  Synthetic
QLVGRRNI

SEQ ID NO: 919 - protein, 8 aa, Artificial Sequence
  Synthetic
QLVGRRNI

SEQ ID NO: 920 - protein, 8 aa, Artificial Sequence
  Synthetic
QLVGRRNI

SEQ ID NO: 921 - protein, 8 aa, Artificial Sequence
  Synthetic
DEDVHYDS

SEQ ID NO: 922 - protein, 8 aa, Artificial Sequence
  Synthetic
DEDVHYDS

SEQ ID NO: 923 - protein, 8 aa, Artificial Sequence
  Synthetic
EDEIVHYS

SEQ ID NO: 924 - protein, 8 aa, Artificial Sequence
  Synthetic
EDEIVHYS

SEQ ID NO: 925 - protein, 57 aa, Artificial Sequence
  Synthetic
SIESAKAFYQRMTDDASFRTPFEAELSKEERQQLIKDSGYDFTAEEWQQAMTEIQAA

SEQ ID NO: 926 - protein, 42 aa, Artificial Sequence; identical to SEQ ID NO: 735
  Synthetic

SEQ ID NO: 927 - protein, 14 aa, Artificial Sequence
  Synthetic
IKFSTLSQRISAIT

SEQ ID NO: 928 - protein, 39 aa, Artificial Sequence; identical to SEQ ID NO: 739
  Synthetic

SEQ ID NO: 929 - protein, 29 aa, Artificial Sequence
  Synthetic
  misc_feature (5)..(6): Xaa can be any naturally occurring amino acid
  misc_feature (9)..(10): Xaa can be any naturally occurring amino acid
  misc_feature (12)..(12): Xaa can be any naturally occurring amino acid
  misc_feature (25)..(25): Xaa can be any naturally occurring amino acid
GSCGXXGVXXTXSHECHMNTWQFLXTCCS

SEQ ID NO: 930 - protein, 25 aa, Artificial Sequence
  Synthetic
GGDGVMHTLTHECHMNTWQFLLTCC

SEQ ID NO: 931 - protein, 28 aa, Artificial Sequence
  Synthetic
GSRWWQGVLPTVSHECRMNSFQHIFTCC

SEQ ID NO: 932 - protein, 27 aa, Artificial Sequence
  Synthetic
GGKNGVFKTISHECHLNTWAFLATCCS

SEQ ID NO: 933 - protein, 27 aa, Artificial Sequence
  Synthetic
KGGSGVIHBIAHECNMNAWQPVPBCCS

SEQ ID NO: 934 - protein, 25 aa, Artificial Sequence
  Synthetic
GGDGVMHBLBHECHMNBWQFLLBCC

SEQ ID NO: 935 - protein, 28 aa, Artificial Sequence
  Synthetic
GSRWWQGVLPBVAHECRMNAFQHIFBCC

SEQ ID NO: 936 - protein, 27 aa, Artificial Sequence
  Synthetic
GGKNGVFKBIAHECHLNBWAFLABCCS

SEQ ID NO: 937 - protein, 4 aa, Artificial Sequence
  Synthetic
HYDS

SEQ ID NO: 938 - protein, 21 aa, Artificial Sequence
  Synthetic
  MOD_RES (2)..(2): Xaa may be R, G, N, W, or K
  MOD_RES (6)..(6): Xaa may be W, M, V, L or F
  MOD_RES (7)..(7): Xaa may be F, H, C, P, or K
  MOD_RES (9)..(9): Xaa may be G, L, W, V, or I
GXDGVXXTXSHECHMNTWQFL

SEQ ID NO: 939 - protein, 14 aa, Artificial Sequence
  Synthetic
EELNEEELEAIAGG
